(19) United States
(12) Patent Application Publication
(10) Pub. No.: US 2003/0113726 A1
(43) Pub. Date: Jun. 19, 2003

(54) Human single nucleotide polymorphisms

(76) Inventors: Zenta Tsuchihashi, Pennington, NJ (US); Lester Hui, Fairfax, VA (US); Kim Zerba, New Hope, PA (US); Manling Ma-Edmonds, Lawrenceville, NJ (US); Mark Perrone, Princeton, NJ (US); Brian Swanson, Yardley, PA (US); James Powell, Lumberville, PA (US)

Correspondence Address: STEPHEN B. DAVIS, BRISTOL-MYERS SQUIBB COMPANY, PATENT DEPARTMENT, P O BOX 4000, PRINCETON, NJ, 08543-4000, US

(21) Appl. No.: 10/005,956

(22) Filed: Dec. 3, 2001

Related U.S. Application Data
(60) Provisional application No. 60/251,015, filed on Dec. 4, 2000.
(60) Provisional application No. 60/263,678, filed on Jan. 23, 2001.
(60) Provisional application No. 60/273,037, filed on Mar. 2, 2001.

(51) Int. Cl. C12Q 1/68; C07H 21/04; C12N 9/64; C12P 21/02; C12N 5/06

(52) U.S. Cl. 435/6; 435/69.1; 435/226; 435/320.1; 435/325; 536/23.2

(57) ABSTRACT

The invention provides polynucleotides and polypeptides corresponding to novel gene sequences associated with the incidence of cardiovascular disorders. The invention also provides polynucleotide fragments corresponding to the genomic and/or coding regions of these genes which comprise at least one polymorphic site per fragment. Allele-specific primers and probes which hybridize to these regions, and/or which comprise at least one polymorphic site are also provided. The polynucleotides, primers, and probes of the present invention are useful in phenotype correlations, paternity testing, medicine, and genetic analysis. Also provided are vectors, host cells, antibodies, and recombinant and synthetic methods for producing said polypeptides. The invention further relates to diagnostic and therapeutic methods for applying these novel polypeptides to the diagnosis, treatment, and/or prevention of various diseases and/or disorders, particularly cardiovascular diseases related to these polypeptides. The invention further relates to screening methods for identifying agonists and antagonists of the polynucleotides and polypeptides of the present invention.

[0001] This application claims benefit to provisional application U.S. Serial No. 60/251,015, filed Dec. 4, 2000; to provisional application U.S. Serial No. 60/263,678, filed Jan. 23, 2001; and to provisional application U.S. Serial No. 60/273,037, filed Mar. 2, 2001.

### FIELD OF THE INVENTION

[0002] The invention provides polynucleotides and polypeptides corresponding to novel gene sequences associated with the incidence of cardiovascular diseases. The invention also provides polynucleotide fragments corresponding to the genomic and/or coding regions of these genes which comprise at least one polymorphic site per fragment. Allele-specific primers and probes which hybridize to these regions, and/or which comprise at least one polymorphic site are also provided. The polynucleotides, primers, and probes of the present invention are useful in phenotype correlations, paternity testing, medicine, and genetic analysis. Also provided are vectors, host cells, antibodies, and recombinant and synthetic methods for producing said polypeptides. The invention further relates to diagnostic and therapeutic methods for applying these novel polypeptides to the diagnosis, treatment, and/or prevention of various diseases and/or disorders, particularly cardiovascular diseases related to these polypeptides. The invention further relates to screening methods for identifying agonists and antagonists of the polynucleotides and polypeptides of the present invention.

### BACKGROUND OF THE INVENTION

[0003] The genomes of all organisms undergo spontaneous mutation in the course of their continuing evolution, generating variant forms of progenitor nucleic acid sequences (Gusella, Ann. Rev. Biochem., 55:831-854 (1986). The variant form may confer an evolutionary advantage or disadvantage relative to a progenitor form, or may be neutral. In some instances, a variant form confers a lethal disadvantage and is not transmitted to subsequent generations of the organism. In other instances, a variant form confers an evolutionary advantage to the species and is eventually incorporated into the DNA of many or most members of the species and effectively becomes the progenitor form. In many instances, both progenitor and variant form(s) survive and co- exist in a species population. The coexistence of multiple forms of a sequence gives rise to polymorphisms.

[0004] Several different types of polymorphism have been reported. A restriction fragment length polymorphism (RFLP) is a variation in DNA sequence that alters the length of a restriction fragment (Botstein et al., Am. J. Hum. Genet, 32:314-331 (1980). The restriction fragment length polymorphism may create or delete a restriction site, thus changing the length of the restriction fragment. RFLPs have been widely used in human and animal genetic analyses (see WO90/13668; WO90/11369; Donis-Keller, Cell , 51:319-337 (1987); Lander et al., Genetics 121,85-99 (1989)). When a heritable trait can be linked to a particular RFLP, the presence of the RFLP in an individual can be used to predict the likelihood that the animal will also exhibit the trait.

[0005] Other polymorphisms take the form of short tandem repeats (STRs) that include tandem di-, tri- and tetra-nucleotide repeated motifs. These tandem repeats are also referred to as variable number tandem repeat (VNTR) polymorphisms. VNTRs have been used in identity and paternity analysis (U.S. Pat. No. 5,075,217; Annour et al., FEBSLett. 307, 113-115 (1992); Horn et al., WO 91/14003; Jeffreys, EP 370,719), and in a large number of genetic mapping studies.

[0006] Other polymorphisms take the form of single nucleotide variations between individuals of the same species. Such polymorphisms are far more frequent than RFLPs, STRs and VNTRs. Some single nucleotide polymorphisms (SNP) occur in protein-coding nucleic acid sequences (coding sequence SNP ( cSNP)), in which case, one of the polymorphic forms may give rise to the expression of a defective or otherwise variant protein and, potentially, a genetic disease. Examples of genes in which polymorphisms within coding sequences give rise to genetic disease include—globin (sickle cell anemia), apoE4 (Alzheimer's Disease), Factor V Leiden (thrombosis), and CFTR (cystic fibrosis). cSNPs can alter the codon sequence of the gene and therefore specify an alternative amino acid. Such changes are called “missense” when another amino acid is substituted, and “nonsense” when the alternative codon specifies a stop signal in protein translation. When the cSNP does not alter the amino acid specified the cSNP is called “silent”.

[0007] Other single nucleotide polymorphisms occur in noncoding regions. Some of these polymorphisms may also result in defective protein expression (e.g., as a result of defective splicing). Other single nucleotide polymorphisms have no phenotypic effects. Single nucleotide polymorphisms can be used in the same manner as RFLPs and VNTRs, but offer several advantages.

[0008] Single nucleotide polymorphisms occur with greater frequency and are spaced more uniformly throughout the genome than other forms of polymorphism. The greater frequency and uniformity of single nucleotide polymorphisms means that there is a greater probability that such a polymorphism will be found in close proximity to a genetic locus of interest than would be the case for other polymorphisms. The different forms of characterized single nucleotide polymorphisms are often easier to distinguish than other types of polymorphism (e.g., by use of assays employing allele-specific hybridization probes or primers).

[0009] Only a small percentage of the total repository of polymorphisms in humans and other organisms has been identified. The limited number of polymorphisms identified to date is due to the large amount of work required for their detection by conventional methods. For example, a conventional approach to identifying polymorphisms might be to sequence the same stretch of DNA in a population of individuals by dideoxy sequencing. In this type of approach, the amount of work increases in proportion to both the length of sequence and the number of individuals in a population and becomes impractical for large stretches of DNA or large numbers of persons.

[0010] Angiotensin converting enzyme (ACE) inhibitors are a class of therapeutic agents, which have been widely used for the treatment of hypertension(Brown N.J. 1998). Inhibition of ACE leads to a reduced concentration of angiotensin II, a key regulator of blood pressure. ACE inhibition also causes the increase of bradykinin, another ACE substrate, which is a vasodilator. This action also contributes to the reduction of blood pressure. Vasopaptidase inhibitors is another class of therapeutic agents designed for hypertension treatment. Vasopeptidase inhibitor such as Omapatrilat inhibits both ACE and neutral endopeptidase (NEP)(Robl J A 1997; Coats 2000). NEP inhibition reduces the degradation of atrial natriuretic peptide (ANP), which also contributes to the decrease of blood pressure.

[0011] Angioedema is a relatively rare, but potentially life-threatening side effect associated with ACE inhibitors(Anderson M W 1990; Brown N.J. 1998; van Rijnsoever E W 1998; Agostoni A 1999). This side effect is believed to be a class effect directly caused by ACE inhibition, since it is observed with a variety of ACE inhibitors, and can develop after a long-term treatment, even though the majority of the cases occur within hours to days after the start of the treatment(Brown N.J. 1997; Schiller PI 1997; Agostoni A 1999). Angioedema has also been observed in vasopeptidase inhibitor treatment(Coats 2000). Both with the cases of ACE inhibitor and vasopeptidase inhibitor, Angioedema has been noted to be more common in African Americans than in Caucasians, suggesting a genetic factor for susceptibility(Brown N.J. 1996; Brown N.J. 1998; Agostoni A 1999; Coats 2000). Hereditary form of angioedema, which is independent of ACE inhibitors, is caused by a deficiency in Cl esterase inhibitor(Tosi 1998; Ebo DG 2000).

[0012] Bradykinin (BK) is a vasodilatory peptide generated from high molecular weight (HMW) kininogen through the action of serine proteases including tissue and plasma kallikreins(Barnes 1997). Two types of bradykinin receptors, B1 and B2 have been identified, of which the B2 receptor is in general constitutively expressed, while the B1 receptor is inducible(Marceau F 1997; Marceau, Hess et al. 1998; Marceau F 1998). Lys-des-Arg¹⁰ bradykinin (des-Arg¹⁰ kallidin),Lys-bradykinin (kallidin) is another peptide derived from kininogen through the action of tissue kallikrein. Both bradykinin and kallidin are substrates of kininase I (generic name for carboxypeptidases which act on bradykinin including carboxypeptidase M, carboxypeptidase N, and carboxypeptidase U), which converts them into des-Arg⁹ bradykinin and des-Arg¹⁰ kallidin respectively. Both des-Arg⁹ bradykinin and des-Arg¹⁰ kallidin are much more potent effector for the B1 receptor than bradykinin and kallidin themselves. Both des-Arg⁹ bradykinin and des-Arg¹⁰ kallidin are inactivated by aminopeptidase P as well as by ACE and NEP(Marceau F 1997; Marceau F 1998; Marceau F 1999). Some of the actions of bradykinin are mediated through NK1 tachykinin receptor after induction of substance P(Marceau, Hess et al. 1998).

[0013] The Bradykinin pathway is suspected as playing a role in the incidence of angioedema for several reasons: 1) Bradykinin is a substrate of ACE, and thus expected to be increased in the presence of ACE inhibitors. 2) It causes microvascular leakage, which might be involved in the angioedema phenotype. 3) Deficiency in the blood coagulation pathway, such as a defect in Cl esterase inhibitor, is expected to alter the bradykinin level. 4) There are reports on the increase of bradykinin level during acute drug induced angioedema and hereditary angioedema(Nussberger, Cugno et al. 1998; Nussberger J 1999).

[0014] Members of the bradykinin pathway include, for example, the aminopeptidase P protein (XPNPEP2), the bradykinin B1 receptor (BDKRB1), the bradykinin B2 receptor (BDKRB2), the NK1 tachykinin receptor (TACRI), the C1 esterase inhibitor protein (C1NH), the tissue kallikrein protein (KLK1), angiotension converting enzyme 2 (ACE2), and the kallistatin protein (PI4; also referred to as SERPINA4). The bradykinin B1 receptor, the bradykinin B2 receptor, and the NK1 tachykinin receptor are involved in bradykinin signal transduction, while the other five proteins affect the production/degradation of bradykinin and other active kinins. These proteins have been selected for analysis of potential single nucleotide polymorphims in their encoding polynucleotide sequence based upon their participation in the bradykinin pathway.

[0015] Aminopeptidase P is a hydrolase that is specific for N-terminal imido bonds. Structurally, the enzyme is a member of the ‘pita bread fold’ family and occurs in mammalian tissues in both soluble and GPI-anchored membrane-bound forms. The deduced XPNPEP2 protein has 673 amino acids and an estimated molecular mass of 75,490 Da. The human and pig XPNPEP2 amino acid sequences show significant evolutionary divergence, with 83% identity; 5 of 6 potential N-glycosylation sites, and 5 of 6 cysteine residues that are potentially involved in disulfide bond formation, are conserved.

[0016] The bradykinin B1 and B2 receptors are G-protein coupled receptors with seven trans-membrane domains. The bradykinin B1 receptor is bradykinin inducible, while the bradykinin B2 receptor is constitutively expressed.

[0017] The NK1 tachykinin receptor is a receptor for tachykinins, which include, for example, substance P. The NK1 tachykinin receptor is a G-protein coupled receptor with seven trans-membrane domains. Bradykinin binding to the bradykinin B2 receptor causes the release of neuropeptides, such as substance P, ultimately leading to the activation of the NK1 tachykinin receptor.

[0018] C1 esterase inhibitor regulates the first component of complement (C1) by inhibition of the proteolytic activity of its subcomponents C1r and C1s. Such inhibition prevents activation of C4 and C2 by C1s. C1I also inhibits several other serine proteinases including plasmin, kallikrein, and coagulation factors XIa and XIIa. (Davis, A. E., III et al., Proc. Nat. Acad. Sci. 83: 3161-3165, 1986.) The C1 esterase inhibitor is known to comprise a 22-residue signal peptide at the N-terminal end of the protein.

[0019] Tissue kallikrein is a serine protease that is involved in the post-translational processing of peptides. The post-translational processing activity of the tissue kallikrein protein includes the generation of bradykinin from high molecular weight kininogen.

[0020] ACE2 is a zinc metalloprotease with a significant sequence homology with angiotensin converting enzyme (ACE, DCP1), and like ACE, ACE2 cleaves angiotensin I in vitro. Moreover, it has been shown that des-Arg bradykinin is also a substrate for both ACE and ACE2 in vitro. des-Arg bradykinin is an active derivative of bradykinin, and it has been suggested that an increased level of this molecule may cause angioedema (Blais, C. et al.Immunopharmacology 1999;43:293-302). ACE inhibition by ACE inhibitors, which include the vasopeptidase inhibitor Omapatrilat, is expected to increase the local concentration of des-Arg bradykinin—such an effect may be the mechanism of ACE inhibitor and/or Omapatrilat-induced angioedema. Assuming the latter model is correct, the expression level of other proteases that can inactivate des-Arg bradykinin, such as ACE2, may determine one's susceptibility to angioedema upon ACE inhibitor (or Omapatrilat) treatment. For example, individuals with low ACE2 activity may be more sensitive to angioedema due to these individuals inability to rapidly degrade des-Arg bradykinin when ACE is inhibited. ACE2 has been shown to be insensitive to ACE inhibitors. The ACE2 protein is known to comprise the following features: a HEXXH motif (His374-His378); a Zn-binding motif, Glu406; Zn-binding, Ser740-Phe762; and a transmembrane domain (Tipnis, S. et al, (2000) J. Biol. Chem.. 275, 33238-33243).

[0021] Kallistatin (PI4) tightly binds and inhibits tissue kallikrein, which is a key protease for generation of bradykinin and other kinins. Bradykinin and another active kinin, kallidin, are generated by cleavage of kininogens by kallikreins, which include tissue kallikrein. Thus, protein and activity levels of kallistatin can have a direct effect on the amount of bradykinin and other kinin levels. Since these kinin molecules are potentially involved in the angioedema phenotype, a molecule which can affect the kinin level, such as kallistatin, may also have an involvement in angioedema. Kallistatin is also shown to be a potent vasodilator. The kallistatin protein is a new member of the serpin superfamily and represents a major inhibitor of human tissue kallikrein in the circulation. Amino acid residues Lys386 (P3), Phe387 (P2), Phe388 (P1), Ser389 (P1′), and Ala390 (P2′) are involved in the binding to the active site of tissue kallikrein and its inhibition. The translated amino acid sequence of kallistatin matches the protein sequence and shares 44 to 46% sequence identity with human alpha-1-antichymotrypsin (AACT; 107280), alpha-1-antitrypsin (PI; 107400), corticosteroid-binding globulin (CBG; 122500), thyroxine-binding globulin of serum (TBG; 314200), and protein C inhibitor (PCI; 227300).

[0022] Genetic polymorphisms in members of the bradykinin pathway may cause alterations in the level of bradykinin or its related peptides, or may affect downstream signal transduction. Such polymorphisms may genetically predispose certain individuals to an increased risk of developing angioedema. Such polymorphisms are expected to show a significant difference in allele frequency between healthy individuals and angioedema subjects. Genotypes of such polymorphisms can predict each individual's susceptibility to angioedema upon ACE inhibitor treatment, and thus will be useful in identifying a group of high risk individuals.

### SUMMARY OF THE INVENTION

[0023] Work described herein pertains to the identification of polymorphisms which can predispose individuals to disease, by resequencing large numbers of genes in a large number of individuals. Various genes from a number of individuals have been resequenced as described herein, and SNPs in these genes have been discovered (see Tables I, IV, V, or VI). Some of these SNPs are cSNPs (coding SNPs) which specify a different amino acid sequence (described as “missense” under the ‘Mutation Type’ column of Tables IV, V, or VI); some of the SNPs are silent cSNPs (shown as mutation type “silent” under the ‘Mutation Type’ column of Tables IV, V, or VI), and some of these cSNPs may specify a stop signal in protein translation. Some of the identified SNPs were located in non-coding regions (described as “non-CDS” in the ‘Mutation Type’ column of Tables IV, V, or VI).

[0024] The invention relates to a nucleic acid molecule which comprises a single nucleotide polymorphism at a specific location. In a particular embodiment the invention relates to the variant allele of a gene or polynucleotide having a single nucleotide polymorphism, which variant allele differs from a reference allele by one nucleotide at the site(s) identified in Tables I, IV, V, VI, or elsewhere herein. Complements of these nucleic acid segments are also provided. The segments can be DNA or RNA, and can be double- or single-stranded. Segments can be, for example, 5-10,5-15, 10-20,5-25,10-30, 10-50 or 10-100 bases long. In another embodiment, the invention relates to the reference or wild type allele of a gene or polynucleotide having a single nucleotide polymorphism, which reference or wild type allele differs from a variant allele by one nucleotide at the site(s) identified in Tables I, IV, V, VI, or elsewhere herein. Complements of these nucleic acid segments are also provided. The segments can be DNA or RNA, and can be double- or single-stranded. Segments can be, for example, 5-10,5-15, 10-20,5-25,10-30, 10-50 or 10-100 bases long.

[0025] The invention further provides variant and reference allele-specific oligonucleotides that hybridize to a nucleic acid molecule comprising a single nucleotide polymorphism or to the complement of the nucleic acid molecule. These oligonucleotides can be probes or primers.

[0026] The invention further provides oligonucleotides that may be used to amplify across a single nucleotide polymorphic site of the present invention. The invention further provides oligonucleotides that may be used to sequence said amplified sequence. The invention further provides a method of analyzing a nucleic acid from a DNA sample using said amplification and sequencing primers to assess whether said sample contains the reference or variant base (allele) at the polymorphic site, comprising the steps of amplifying a sequence using appropriate PCR primers for amplifying across a polymorphic site, sequencing the resulting amplified product using appropriate sequencing primers to sequence said product, and determining whether the variant or reference base is present at the polymorphic site. The invention further provides a method of analyzing a nucleic acid from DNA sample(s) from various ethnic populations using said amplification and sequencing primers to assess whether said sample(s) contain the reference or variant base (allele) at the polymorphic site in an effort to identify populations at risk of developing angiodema upon administration of an ACE inhibitor and/or vasopeptidase inhibitor and/or neutral endopeptidase (NEP) inhibitor, comprising the steps of amplifying a sequence using appropriate PCR primers for amplifying across a polymorphic site, sequencing the resulting amplified product using appropriate sequencing primers to sequence said product, and determining whether the variant or reference base is present at the polymorphic site, and optionally determining the statistical association between either the reference or variant allele at the polymorphic site(s) to the incidence of angioedema.

[0027] The invention further provides oligonucleotides that may be used to genotype DNA sample(s) to assess whether said sample(s) contain the reference or variant base (allele) at the polymorphic site(s). The invention provide a method of using oligonucleotides that may be used to genotype a DNA sample to assess whether said sample contains the reference or variant base (allele) at the polymorphic site comprising the steps of amplifying a sequence using appropriate PCR primers for amplifying across a polymorphic site, subjecting the product of said amplification to a genetic bit analysis (GBA) reaction, and analyzing the result.

[0028] The invention provides a method of using oligonucleotides that may be used to genotype DNA sample(s) to identify individual(s) that may be at risk of developing angioedema upon administration of an ACE inhibitor and/or vasopeptidase inhibitor and/or neutral endopeptidase (NEP) inhibitor to assess whether said sample(s) contains the reference or variant base (allele) at the polymorphic site(s) comprising the steps of amplifying a sequence using appropriate PCR primers for amplifying across a polymorphic site, subjecting the product of said amplification to a genetic bit analysis (GBA) reaction, analyzing the result, and optionally determining the statistical association between either the reference or variant allele at the polymorphic site(s) to the incidence of angioedema..

[0029] The invention provides a method of using oligonucleotides that may be used to genotype DNA sample(s) to identify ethnic population(s) that may be at risk of developing angioedema upon administration of an ACE inhibitor and/or vasopeptidase inhibitor and/or neutral endopeptidase (NEP) inhibitor to assess whether said sample(s) contain the reference or variant base (allele) at the polymorphic site comprising the steps of amplifying a sequence using appropriate PCR primers for amplifying across a polymorphic site, subjecting the product of said amplification to a genetic bit analysis (GBA) reaction, analyzing the result, and optionally determining the statistical association between either the reference or variant allele at the polymorphic site(s) to the incidence of angioedema.

[0030] The invention further provides a method of analyzing a nucleic acid from an individual. The method allows the determination of whether the reference or variant base is present at any one, or more, of the polymorphic sites shown in Tables I, IV, V, VI or elsewhere herein. Optionally, a set of bases occupying a set of the polymorphic sites shown in Tables I, IV, V, VI or elsewhere herein, is determined. This type of analysis can be performed on a number of individuals, who are also tested (previously, concurrently or subsequently) for the presence of a disease phenotype. The presence or absence of disease phenotype is then correlated with a base or set of bases present at the polymorphic site or sites in the individuals tested.

[0031] Thus, the invention further relates to a method of predicting the presence, absence, likelihood of the presence or absence, or severity of a particular phenotype or disorder associated with a particular genotype. The method comprises obtaining a nucleic acid sample from an individual and determining the identity of one or more bases (nucleotides) at specific (e.g., polymorphic) sites of nucleic acid molecules described herein, wherein the presence of a particular base at that site is correlated with a specified phenotype or disorder, thereby predicting the presence, absence, likelihood of the presence: or absence, or severity of the phenotype or disorder in the individual, wherein the phenotype or disorder is preferably a cardiovascular disease, and more preferably either angioedema or an angioedema-like disorder.

[0032] The invention further relates to polynucleotides having one or more variant alleles. The invention also relates to said polynucleotides lacking a start codon. The invention further relates to polynucleotides of the present invention containing one or more variant alleles wherein said polynucleotides encode a polypeptide of the present invention. The invention relates to polypeptides of the present invention containing one or more variant amino acids encoded by one or more variant alleles.

[0033] The present invention relates to antisense oligonucleotides corresponding to the polynucleotides of the present invention. Preferably, such antisense oligonucleotides are capable of discriminating against the reference or variant allele of the polynucleotide, preferably at one or more polymorphic sites of said polynucleotide.

[0034] The present invention relates to antibodies directed against the polypeptides of the present invention. Preferably, such antibodies are capable of discriminating against the reference or variant allele of the polypeptide, preferably at one or more polymorphic sites of said polynucleotide.

[0035] The present invention also relates to recombinant vectors, which include the isolated nucleic acid molecules of the present invention, and to host cells containing the recombinant vectors, as well as to methods of making such vectors and host cells, in addition to their use in the production of polypeptides or peptides provided herein using recombinant techniques. Synthetic methods for producing the polypeptides and polynucleotides of the present invention are provided. Also provided are diagnostic methods for detecting diseases, disorders, and/or conditions related to the polypeptides and polynucleotides provided herein, and therapeutic methods for treating such diseases, disorders, and/or conditions. The invention further relates to screening methods for identifying binding partners of the polypeptides.

[0036] The invention further provides an isolated polypeptide having an amino acid sequence encoded by a polynucleotide described herein.

### BRIEF DESCRIPTION OF THE FIGURES/DRAWINGS

[0037] FIGS. 1A-D show the polynucleotide sequence (SEQ ID NO: 1) and deduced amino acid sequence (SEQ ID NO:2) of the human aminopeptidase P protein, XPNPEP2 (Genbank Accession No: AAB96394.1). The standard one-letter abbreviation for amino acids is used to illustrate the deduced amino acid sequence. The polynucleotide sequence contains a sequence of 3428 nucleotides (SEQ ID NO:1), encoding a polypeptide of 673 amino acids (SEQ ID NO:2).

[0038] FIGS. 2A-D show the polynucleotide sequence (SEQ ID NO: 3) and deduced amino acid sequence (SEQ ID NO:4) of the human aminopeptidase P protein variant, XPNPEP2-C2085G (SNP_ID: AE100s1) of the present invention. The standard one-letter abbreviation for amino acids is used to illustrate the deduced amino acid sequence. The polynucleotide sequence contains a sequence of 3428 nucleotides (SEQ ID NO:3), encoding a polypeptide of 673 amino acids (SEQ ID NO:4). The predicted ‘C’ to ‘G’ polynucleotide polymorphism is located at nucleic acid 2085 of SEQ ID NO:3 and is represented in bold. The polymorphism is a silent mutation and does not change the amino acid sequence of the encoded polypeptide.

[0039] FIGS. 3A-B show the polynucleotide sequence (SEQ ID NO: 5) and deduced amino acid sequence (SEQ ID NO:6) of the human bradykinin receptor B1 protein, BDKRB1 (Genbank Accession No: NP_{—}000701.1). The standard one-letter abbreviation for amino acids is used to illustrate the deduced amino acid sequence. The polynucleotide sequence contains a sequence of 1082 nucleotides (SEQ ID NO:5), encoding a polypeptide of 353 amino acids (SEQ ID NO:6).

[0040] FIGS. 4A-B show the polynucleotide sequence (SEQ ID NO: 7) and deduced amino acid sequence (SEQ ID NO:8) of the human bradykinin receptor B1 protein variant, BDKRB1-G956A (SNP_ID: AE103s1) of the present invention. The standard one-letter abbreviation for amino acids is used to illustrate the deduced amino acid sequence. The polynucleotide sequence contains a sequence of 1082 nucleotides (SEQ ID NO:7), encoding a polypeptide of 353 amino acids (SEQ ID NO:8). The predicted ‘G’ to ‘A’ polynucleotide polymorphism is located at nucleic acid 956 of SEQ ID NO:7 and is represented in bold. The polymorphism is a missense mutation resulting in a change in an encoding amino acid from ‘R’ to ‘Q’ at amino acid position 317 of SEQ ID NO:8 and is represented by underlining.

[0041] FIGS. 5A-D show the polynucleotide sequence (SEQ ID NO: 9) and deduced amino acid sequence (SEQ ID NO: 10) of the human bradykinin receptor B1 protein variant, BDKRB1-T129C (SNP_ID: AE103s2) of the present invention. The standard one-letter abbreviation for amino acids is used to illustrate the deduced amino acid sequence. The polynucleotide sequence contains a sequence of 1082 nucleotides (SEQ ID NO:9), encoding a polypeptide of 353 amino acids (SEQ ID NO: 10). The predicted ‘T’ to ‘C’ polynucleotide polymorphism is located at nucleic acid 129 of SEQ ID NO:9 and is represented in bold. The polymorphism is a silent mutation and does not change the amino acid sequence of the encoded polypeptide.

[0042] FIGS. 6A-D show the polynucleotide sequence (SEQ ID NO: 11) and deduced amino acid sequence (SEQ ID NO: 12) of the human bradykinin receptor B2 protein, BDKRB2 (Genbank Accession No: NP_{—}000614.1). The standard one-letter abbreviation for amino acids is used to illustrate the deduced amino acid sequence. The polynucleotide sequence contains a sequence of 3733 nucleotides (SEQ ID NO: 11), encoding a polypeptide of 391 amino acids (SEQ ID NO: 12).

[0043] FIGS. 7A-B show the polynucleotide sequence (SEQ ID NO: 13) and deduced amino acid sequence (SEQ ID NO:14) of the human tachykinin receptor 1 protein, TACR1 (Genbank Accession No: NP_{—}001049.1). The standard one-letter abbreviation for amino acids is used to illustrate the deduced amino acid sequence. The polynucleotide sequence contains a sequence of 1766 nucleotides (SEQ ID NO:13), encoding a polypeptide of 407 amino acids (SEQ ID NO: 14).

[0044] FIGS. 8A-B show the polynucleotide sequence (SEQ ID NO: 15) and deduced amino acid sequence (SEQ ID NO:16) of the human tachykinin receptor 1 protein variant, TACR1-A543G (SNP_ID: AE106s1) of the present invention. The standard one-letter abbreviation for amino acids is used to illustrate the deduced amino acid sequence. The polynucleotide sequence contains a sequence of 1766 nucleotides (SEQ ID NO: 15), encoding a polypeptide of 407 amino acids (SEQ ID NO: 16). The predicted ‘A’ to ‘G’ polynucleotide polymorphism is located at nucleic acid 543 of SEQ ID NO: 15 and is represented in bold. The polymorphism is a silent mutation and does not change the amino acid sequence of the encoded polypeptide.

[0045] FIGS. 9A-B show the polynucleotide sequence (SEQ ID NO: 17) and deduced amino acid sequence (SEQ ID NO: 18) of the human tachykinin receptor 1 protein variant, TACR1-G672T (SNP_ID: AE106s2) of the present invention. The standard one-letter abbreviation for amino acids is used to illustrate the deduced amino acid sequence. The polynucleotide sequence contains a sequence of 1766 nucleotides (SEQ ID NO: 17), encoding a polypeptide of 407 amino acids (SEQ ID NO: 18). The predicted ‘G ’ to ‘T’ polynucleotide polymorphism is located at nucleic acid 672 of SEQ ID NO:17 and is represented in bold. The polymorphism is a silent mutation and does not change the amino acid sequence of the encoded polypeptide.

[0046] FIGS. 10A-B show the polynucleotide sequence (SEQ ID NO: 19) and deduced amino acid sequence (SEQ ID NO:20) of the human tachykinin receptor 1 protein variant, TACRI-C1344T (SNP ID: AE106s7) of the present invention. The standard one-letter abbreviation for amino acids is used to illustrate the deduced amino acid sequence. The polynucleotide sequence contains a sequence of 1766 nucleotides (SEQ ID NO:19), encoding a polypeptide of 407 amino acids (SEQ ID NO:20). The predicted ‘C’ to ‘T’ polynucleotide polymorphism is located at nucleic acid 1344 of SEQ ID NO: 19 and is represented in bold. The polymorphism is a silent mutation and does not change the amino acid sequence of the encoded polypeptide.

[0047] FIGS. 11A-B show the polynucleotide sequence (SEQ ID NO: 21) and deduced amino acid sequence (SEQ ID NO:22) of the human C1 esterase inhibitor protein, C1NH (Genbank Accession No: NP_{—}000053.1). The standard one-letter abbreviation for amino acids is used to illustrate the deduced amino acid sequence. The polynucleotide sequence contains a sequence of 1826 nucleotides (SEQ ID NO:21), encoding a polypeptide of 500 amino acids (SEQ ID NO:22).

[0048] FIGS. 12A-B show the polynucleotide sequence (SEQ ID NO: 23) and deduced amino acid sequence (SEQ ID NO:24) of the human C1 esterase inhibitor protein variant, C1NH-C1278T (SNP_ID: AE105s3) of the present invention. The standard one-letter abbreviation for amino acids is used to illustrate the deduced amino acid sequence. The polynucleotide sequence contains a sequence of 1826 nucleotides (SEQ ID NO:23), encoding a polypeptide of 500 amino acids (SEQ ID NO:24). The predicted ‘C’ to ‘T’ polynucleotide polymorphism is located at nucleic acid 1278 of SEQ ID NO:23 and is represented in bold. The polymorphism is a silent mutation and does not change the amino acid sequence of the encoded polypeptide.

[0049] FIGS. 13A-B show the polynucleotide sequence (SEQ ID NO: 25) and deduced amino acid sequence (SEQ ID NO:26) of the human C1 esterase inhibitor protein variant, CINH-C227T (SNP_ID: AE105s4) of the present invention. The standard one-letter abbreviation for amino acids is used to illustrate the deduced amino acid sequence. The polynucleotide sequence contains a sequence of 1826 nucleotides (SEQ ID NO:25), encoding a polypeptide of 500 amino acids (SEQ ID NO:26). The predicted ‘T’ to ‘C’ polynucleotide polymorphism is located at nucleic acid 227 of SEQ ID NO:25 and is represented in bold. The polymorphism is a missense mutation resulting in a change in an encoding amino acid from ‘V’ to ‘A’ at amino acid position 56 of SEQ ID NO:26 and is represented by underlining.

[0050] FIGS. 14A-B show the polynucleotide sequence (SEQ ID NO: 27) and deduced amino acid sequence (SEQ ID NO:28) of the human C1 esterase inhibitor protein variant, C1NH-C536G (SNP_ID: AE105s5) of the present invention. The standard one-letter abbreviation for amino acids is used to illustrate the deduced amino acid sequence. The polynucleotide sequence contains a sequence of 1826 nucleotides (SEQ ID NO:27), encoding a polypeptide of 500 amino acids (SEQ ID NO:28). The predicted ‘C’ to ‘G’ polynucleotide polymorphism is located at nucleic acid 536 of SEQ ID NO:27 and is represented in bold. The polymorphism is a missense mutation resulting in a change in an encoding amino acid from ‘A’ to ‘G’ at amino acid position 159 of SEQ ID NO:28 and is represented by underlining.

[0051] FIGS. 15A-B show the polynucleotide sequence (SEQ ID NO: 29) and deduced amino acid sequence (SEQ ID NO:30) of the human C1 esterase inhibitor protein variant, C1NH-G1498A (SNP_ID: AE105s6) of the present invention. The standard one-letter abbreviation for amino acids is used to illustrate the deduced amino acid sequence. The polynucleotide sequence contains a sequence of 1826 nucleotides (SEQ ID NO:29), encoding a polypeptide of 500 amino acids (SEQ ID NO:30). The predicted ‘G’ to ‘A’ polynucleotide polymorphism is located at nucleic acid 1498 of SEQ ID NO:29 and is represented in bold. The polymorphism is a missense mutation resulting in a change in an encoding amino acid from ‘V’ to ‘M’ at amino acid position 480 of SEQ ID NO:30 and is represented by underlining.

[0052] FIG. 16 shows the polynucleotide sequence (SEQ ID NO: 31) and deduced amino acid sequence (SEQ ID NO:32) of the human kallikrein 1 protein, KLK1 (Genbank Accession No: NP_{—}002248.1). The standard one-letter abbreviation for amino acids is used to illustrate the deduced amino acid sequence. The polynucleotide sequence contains a sequence of 871 nucleotides (SEQ ID NO:31), encoding a polypeptide of 262 amino acids (SEQ ID NO:32).

[0053] FIG. 17 shows the polynucleotide sequence (SEQ ID NO: 33) and deduced amino acid sequence (SEQ ID NO:34) of the human kallikrein 1 protein variant, KLK1-A592G (SNP_ID: AE107s1) of the present invention. The standard one-letter abbreviation for amino acids is used to illustrate the deduced amino acid sequence. The polynucleotide sequence contains a sequence of 871 nucleotides (SEQ ID NO:33), encoding a polypeptide of 262 amino acids (SEQ ID NO:34). The predicted ‘A’ to ‘G’ polynucleotide polymorphism is located at nucleic acid 592 of SEQ ID NO:33 and is represented in bold. The polymorphism is a missense mutation resulting in a change in an encoding amino acid from ‘K’ to ‘E’ at amino acid position 186 of SEQ ID NO:34 and is represented by underlining.

[0054] FIG. 18 shows the polynucleotide sequence (SEQ ID NO: 35) and deduced amino acid sequence (SEQ ID NO:36) of the human kallikrein 1 protein variant, KLK1-G469C (SNP_ID: AE107s3) of the present invention. The standard one-letter abbreviation for amino acids is used to illustrate the deduced amino acid sequence. The polynucleotide sequence contains a sequence of 871 nucleotides (SEQ ID NO:35), encoding a polypeptide of 262 amino acids (SEQ ID NO:36). The predicted ‘G’ to ‘C’ polynucleotide polymorphism is located at nucleic acid 469 of SEQ ID NO:35 and is represented in bold. The polymorphism is a missense mutation resulting in a change in an encoding amino acid from ‘E’ to ‘Q’ at amino acid position 145 of SEQ ID NO:36 and is represented by underlining.

[0055] FIG. 19 shows the regions of identity and similarity between the encoded human bradykinin receptor B1 (BDKRB1) protein (Genbank Accession No. P46663; SEQ ID NO:6) to the bradykinin receptor B1 proteins from mouse, BRB1_MOUSE (Genbank Accession No. AAA99778; SEQ ID NO:835); rabbit, BRB2_RABIT, (Genbank Accession No. P48748; SEQ ID NO:836); and rat (BRB1_RAT) (Genbank Accession No. CAA10610; SEQ ID NO:837). The darkly shaded amino acids represent regions of identity, and lightly shaded amino acids represent regions of similarity. The amino acids corresponding to the human bradykinin receptor SNPs of the present invention are highlighted in red and marked with an asterisk ‘*’.

[0056] FIG. 20 shows the regions of identity and similarity between the encoded human bradykinin receptor B2 (BDKRB2) protein (Genbank Accession No. P3041 1; SEQ ID NO:12) to the bradykinin receptor B2 proteins from mouse, BRB2_MOUSE (Genbank Accession No. P32299; SEQ ID NO:838); rabbit, BRB2_RABIT (Genbank Accession No. Q28642; SEQ ID NO:839); pig, BRB2_CAVPO, (Genbank Accession No. 070526; SEQ ID NO:840); and rat (BRB2_RAT) (Genbank Accession No. P25023; SEQ ID NO:841). The darkly shaded amino acids represent regions of identity, and lightly shaded amino acids represent regions of similarity. The amino acids corresponding to the human bradykinin receptor SNPs of the present invention are highlighted in red and marked with an asterisk ‘*’.

[0057] FIGS. 21A-B show the polynucleotide sequence (SEQ ID NO: 289) and deduced amino acid sequence (SEQ ID NO:290) of the human bradykinin receptor B1 protein comprising, or alternatively consisting of, one or more of the predicted polynucleotide polymorphic loci, in addition to, the encoded polypeptide polymorphic loci of the present invention for this particular protein, which include but are not limited to the following polynucleotide polymorphisms: BDKRB1-G956A (SNP_ID: AE103s1), BDKRBl-T129C (SNP_ID: AE103s2), BDKRB1-C348T (SNP_ID: AE103s6), BDKRB1-G462A (SNP_ID: AE103s7), BDKRB1-C577G (SNP_ID: AE103s8), BDKRB1-G705A (SNP_ID: AE103s9) and/or BDKRB1- G728A (SNP_ID: AE103s10); and polypeptide polymorphism - BDKRBl-R317Q (SNP_ID: AE103s1), BDKRB1-L191V (SNP_ID: AE103s8), and/or BDKRB1-R241Q (SNP_ID: AE103s10). The standard one-letter abbreviation for amino acids is used to illustrate the deduced amino acid sequence. The polynucleotide sequence contains a sequence of 1082 nucleotides (SEQ ID NO:289), encoding a polypeptide of 353 amino acids (SEQ ID NO:290). The polynucleotide polymorphic sites are represented by an “N”, in bold. The polypeptide polymorphic sites are represented by an “X”, in bold. The present invention encompasses the polynucleotide at nucleotide position 956 as being either a “G” or an “A”, the polynucleotide at nucleotide position 129 as being either a “T” or a “C”, the polynucleotide at nucleotide position 348 as being either a “C” or a “T” , the polynucleotide at nucleotide position 462 as being either a “G” or a “A”, the polynucleotide at nucleotide position 577 as being either a “C” or a “G”, the polynucleotide at nucleotide position 705 as being either a “G” or a “A”, and the polynucleotide at nucleotide position 728 as being either a “G” or a “A” of FIGS. 21A-B (SEQ ID NO:289), in addition to any combination thereof. The present invention also encompasses the polypeptide at amino acid position 317 as being either an “Arg” or an “Gln”, the polypeptide at amino acid position 191 as being either an “Leu” or a “Val”, and the polypeptide at amino acid position 241 as being either a “Arg” or a “Gln” of FIGS. 21A-B (SEQ ID NO:290).

[0058] FIGS. 22A-B show the polynucleotide sequence (SEQ ID NO: 291) and deduced amino acid sequence (SEQ ID NO:292) of the human tachykinin receptor 1 protein comprising, or alternatively consisting of, one or more of the predicted polynucleotide polymorphic loci, in addition to, the encoded polypeptide polymorphic loci of the present invention for this particular protein, which include but are not limited to the following polynucleotide polymorphisms: TACR1-A543G (SNP_ID: AE106s1), TACR1-G672T (SNP_ID: AE106s2), and TACR1-C1344T (SNP_ID: AE106s7). The standard one-letter abbreviation for amino acids is used to illustrate the deduced amino acid sequence. The polynucleotide sequence contains a sequence of 1766 nucleotides (SEQ ID NO:291), encoding a polypeptide of 407 amino acids (SEQ ID NO:292). The polynucleotide polymorphic sites are represented by an “N”, in bold. The polypeptide polymorphic sites are represented by an “X”, in bold. The present invention encompasses the polynucleotide at nucleotide position 543 as being either an “A” or a “G”, the polynucleotide at nucleotide position 672 as being either a “G” or a “T”, and the polynucleotide at nucleotide position 1344 as being either a “C” or a “T” of FIGS. 22A-B (SEQ ID NO:291), in addition to any combination thereof.

[0059] FIGS. 23A-B show the polynucleotide sequence (SEQ ID NO: 293) and deduced amino acid sequence (SEQ ID NO:294) of the human C1 esterase inhibitor protein comprising, or alternatively consisting of, one or more of the predicted polynucleotide polymorphic loci, in addition to, the encoded polypeptide polymorphic loci of the present invention for this particular protein, which include but are not limited to the following polynucleotide polymorphisms: C1NH-C1278T (SNP_ID: AE105s3), C1NH-T227C (SNP_ID: AE105s4), C1NH-C536G (SNP_ID: AE105s5), and C1NH-G1498A (SNP_ID: AE105s6). The standard one-letter abbreviation for amino acids is used to illustrate the deduced amino acid sequence. The polynucleotide sequence contains a sequence of 1826 nucleotides (SEQ ID NO:293), encoding a polypeptide of 500 amino acids (SEQ ID NO:294). The polynucleotide polymorphic sites are represented by an “N”, in bold. The polypeptide polymorphic sites are represented by an “X”, in bold. The present invention encompasses the polynucleotide at nucleotide position 1278 as being either a “C” or a “T”, the polynucleotide at nucleotide position 227 as being either a “T” or a “C”, the polynucleotide at nucleotide position 536 as being either a “C” or a “G”, and the polynucleotide at nucleotide position 1498 as being either a “G” or an “A” of FIGS. 23A-B (SEQ ID NO:293), in addition to any combination thereof. The present invention also encompasses the polypeptide at amino acid position 56 as being either a “Val” or “Ala”, the polypeptide at amino acid position 159 as being either an “Ala” or “Gly”, and the polypeptide at amino acid position 480 as being either a “Val” or “Met”, of FIGS. 23A-B (SEQ ID NO:294), in addition to any combination thereof.

[0060] FIG. 24 shows the polynucleotide sequence (SEQ ID NO: 295) and deduced amino acid sequence (SEQ ID NO:296) of the human kallikrein 1 protein comprising, or alternatively consisting of, one or more of the predicted polynucleotide polymorphic loci, in addition to, the encoded polypeptide polymorphic loci of the present invention for this particular protein, which include but are not limited to the following polynucleotide polymorphisms: KLK1-A592G (SNP_ID: AE107s1), and KLK1-G469C (SNP_ID: AE107s3). The standard one-letter abbreviation for amino acids is used to illustrate the deduced amino acid sequence. The polynucleotide sequence contains a sequence of 871 nucleotides (SEQ ID NO:295), encoding a polypeptide of 262 amino acids (SEQ ID NO:296). The polynucleotide polymorphic sites are represented by an “N”, in bold. The polypeptide polymorphic sites are represented by an “X”, in bold. The present invention encompasses the polynucleotide at nucleotide position 592 as being either an “A” or a “G”, and the polynucleotide at nucleotide position 469 as being either a “G” or a “C”, of FIG. 24 (SEQ ID NO:295), in addition to any combination thereof. The present invention also encompasses the polypeptide at amino acid position 145 as being either a “Glu” or “Asn”, and the polypeptide at amino acid position 186 as being either a “Lys” or “Glu” of FIG. 24 (SEQ ID NO:296), in addition to any combination thereof.

[0061] FIGS. 25A-B show the polynucleotide sequence (SEQ ID NO: 555) and deduced amino acid sequence (SEQ ID NO:556) of the human bradykinin receptor B1 protein variant, BDKRB1-C348T (SNP_ID: AE103s6) of the present invention. The standard one-letter abbreviation for amino acids is used to illustrate the deduced amino acid sequence. The polynucleotide sequence contains a sequence of 1082 nucleotides (SEQ ID NO:555), encoding a polypeptide of 353 amino acids (SEQ ID NO:556). The predicted ‘C’ to ‘T’ polynucleotide polymorphism is located at nucleic acid 348 of SEQ ID NO:555 and is represented in bold. The polymorphism is a silent mutation and does not change the amino acid sequence of the encoded polypeptide.

[0062] FIGS. 26A-B show the polynucleotide sequence (SEQ ID NO: 557) and deduced amino acid sequence (SEQ ID NO:558) of the human bradykinin receptor B1 protein variant, BDKRB1-G462A (SNP_ID: AE103s7) of the present invention. The standard one-letter abbreviation for amino acids is used to illustrate the deduced amino acid sequence. The polynucleotide sequence contains a sequence of 1082 nucleotides (SEQ ID NO:557), encoding a polypeptide of 353 amino acids (SEQ ID NO:558). The predicted ‘G’ to ‘A’ polynucleotide polymorphism is located at nucleic acid 462 of SEQ ID NO:557 and is represented in bold. The polymorphism is a silent mutation and does not change the amino acid sequence of the encoded polypeptide.

[0063] FIGS. 27A-B show the polynucleotide sequence (SEQ ID NO: 559) and deduced amino acid sequence (SEQ ID NO:560) of the human bradykinin receptor B1 protein variant, BDKRB1-C577G (SNP_ID: AE103s8) of the present invention. The standard one-letter abbreviation for amino acids is used to illustrate the deduced amino acid sequence. The polynucleotide sequence contains a sequence of 1082 nucleotides (SEQ ID NO:559), encoding a polypeptide of 353 amino acids (SEQ ID NO:560). The predicted ‘C’ to ‘G’ polynucleotide polymorphism is located at nucleic acid 577 of SEQ ID NO:559 and is represented in bold. The polymorphism is a silent mutation and does not change the amino acid sequence of the encoded polypeptide. The polymorphism is a missense mutation resulting in a change in an encoding amino acid from ‘L’ to ‘V’ at amino acid position 191 of SEQ ID NO:560 and is represented by underlining.

[0064] FIGS. 28A-B show the polynucleotide sequence (SEQ ID NO: 561) and deduced amino acid sequence (SEQ ID NO:562) of the human bradykinin receptor B1 protein variant, BDKRB1-G705A (SNP_ID: AE103s9) of the present invention. The standard one-letter abbreviation for amino acids is used to illustrate the deduced amino acid sequence. The polynucleotide sequence contains a sequence of 1082 nucleotides (SEQ ID NO:561), encoding a polypeptide of 353 amino acids (SEQ ID NO:562). The predicted ‘G’ to ‘A’ polynucleotide polymorphism is located at nucleic acid 705 of SEQ ID NO:561 and is represented in bold. The polymorphism is a silent mutation and does not change the amino acid sequence of the encoded polypeptide. The polymorphism is a missense mutation resulting in a change in an encoding amino acid from ‘E’ to ‘K’ at amino acid position 233 of SEQ ID NO:562 and is represented by underlining.

[0065] FIGS. 29A-D show the polynucleotide sequence (SEQ ID NO: 563) and deduced amino acid sequence (SEQ ID NO:564) of the human bradykinin receptor B2 protein variant, BDKRB1-C40T (SNP_ID: AE104s19) of the present invention. The standard one-letter abbreviation for amino acids is used to illustrate the deduced amino acid sequence. The polynucleotide sequence contains a sequence of 3733 nucleotides (SEQ ID NO:563), encoding a polypeptide of 391 amino acids (SEQ ID NO:564). The predicted ‘C’ to ‘T’ polynucleotide polymorphism is located at nucleic acid 40 of SEQ ID NO:563 and is represented in bold. The polymorphism is a missense mutation resulting in a change in an encoding amino acid from ‘R’ to ‘C’ at amino acid position 14 of SEQ ID NO:564 and is represented by underlining.

[0066] FIGS. 30A-D show the polynucleotide sequence (SEQ ID NO: 565) and deduced amino acid sequence (SEQ ID NO:566) of the human bradykinin receptor B2 protein variant, BDKRB1-T933C (SNP_ID: AE104s24) of the present invention. The standard one-letter abbreviation for amino acids is used to illustrate the deduced amino acid sequence. The polynucleotide sequence contains a sequence of 3733 nucleotides (SEQ ID NO:565), encoding a polypeptide of 391 amino acids (SEQ ID NO:566). The predicted ‘T’ to ‘C’ polynucleotide polymorphism is located at nucleic acid 933 of SEQ ID NO:565 and is represented in bold. The polymorphism is a silent mutation and does not change the amino acid sequence of the encoded polypeptide.

[0067] FIGS. 31A-D show the polynucleotide sequence (SEQ ID NO: 567) and deduced amino acid sequence (SEQ ID NO:568) of the human bradykinin receptor B2 protein variant, BDKRB1-G1061A (SNP_ID: AE104s25) of the present invention. The standard one-letter abbreviation for amino acids is used to illustrate the deduced amino acid sequence. The polynucleotide sequence contains a sequence of 3733 nucleotides (SEQ ID NO:567), encoding a polypeptide of 391 amino acids (SEQ ID NO:568). The predicted ‘G’ to ‘A’ polynucleotide polymorphism is located at nucleic acid 1061 of SEQ ID NO:567 and is represented in bold. The polymorphism is a missense mutation resulting in a change in an encoding amino acid from ‘G’ to ‘E’ at amino acid position 354 of SEQ ID NO:568 and is represented by underlining.

[0068] FIG. 32A-D shows the polynucleotide sequence (SEQ ID NO: 569) and deduced amino acid sequence (SEQ ID NO:570) of the human angiotension converting enzyme 2 protein, ACE2 (Genbank Accession No: gilAF241254). The standard one-letter abbreviation for amino acids is used to illustrate the deduced amino acid sequence. The polynucleotide sequence contains a sequence of 3405 nucleotides (SEQ ID NO:569), encoding a polypeptide of 805 amino acids (SEQ ID NO:570).

[0069] FIG. 33 shows the polynucleotide sequence (SEQ ID NO: 571) and deduced amino acid sequence (SEQ ID NO:572) of the human protease inhibitor 4 protein, P14, also known as SERPINA4 (Genbank Accession No: giINM_{—}006215). The standard one-letter abbreviation for amino acids is used to illustrate the deduced amino acid sequence. The polynucleotide sequence contains a sequence of 1284 nucleotides (SEQ ID NO:571), encoding a polypeptide of 427 amino acids (SEQ ID NO:572).

[0070] FIGS. 34A-B show the polynucleotide sequence (SEQ ID NO: 573) and deduced amino acid sequence (SEQ ID NO:574) of the human protease inhibitor 4 protein variant, SERPINA4-C699T (SNP_ID: AE110s2) of the present invention. The standard one-letter abbreviation for amino acids is used to illustrate the deduced amino acid sequence. The polynucleotide sequence contains a sequence of 1284 nucleotides (SEQ ID NO:573), encoding a polypeptide of 427 amino acids (SEQ ID NO:574). The predicted ‘C’ to ‘T’ polynucleotide polymorphism is located at nucleic acid 699 of SEQ ID NO:573 and is represented in bold. The polymorphism is a silent mutation and does not change the amino acid sequence of the encoded polypeptide.

[0071] FIGS. 35A-B show the polynucleotide sequence (SEQ ID NO: 575) and deduced amino acid sequence (SEQ ID NO:576) of the human protease inhibitor 4 protein variant, SERPINA4-T597C (SNP_ID: AE110s5) of the present invention. The standard one-letter abbreviation for amino acids is used to illustrate the deduced amino acid sequence. The polynucleotide sequence contains a sequence of 1284 nucleotides (SEQ ID NO:575), encoding a polypeptide of 427 amino acids (SEQ ID NO:576). The predicted ‘T’ to ‘C’ polynucleotide polymorphism is located at nucleic acid 597 of SEQ ID NO:575 and is represented in bold. The polymorphism is a silent mutation and does not change the amino acid sequence of the encoded polypeptide.

[0072] FIG. 36 shows the polynucleotide sequence (SEQ ID NO: 577) and deduced amino acid sequence (SEQ ID NO:578) of the human proteinase inhibitor 4 protein comprising, or alternatively consisting of, one or more of the predicted polynucleotide polymorphic loci, in addition to, the encoded polypeptide polymorphic loci of the present invention for this particular protein, which include but are not limited to the following polynucleotide polymorphisms: SERPINA4-C699T (SNP_ID: AE110s2), SERPINA4-T597C (SNP_ID: AE110s5INA4-C1143G (SNP_ID: AE110s10), and SERPINA4-C412T (SNP-ID: AE110s11); and polypeptide polymorphism—SERPINA4-R138C (SNP_ID: AE110s1). The standard one-letter abbreviation for amino acids is used to illustrate the deduced amino acid sequence. The polynucleotide sequence contains a sequence of 1284 nucleotides (SEQ ID NO:577), encoding a polypeptide of 427 amino acids (SEQ ID NO:578). The polynucleotide polymorphic sites are represented by an “N”, in bold. The present invention encompasses the polynucleotide at nucleotide position 699 as being either a “C” or a “T”, the polynucleotide at nucleotide position 597 as being either a “T” or a “C”, the polynucleotide at nucleotide position 1143 as being either a “C” or a “G”, and/or the polynucleotide at nucleotide position 412 as being either a “C” or a “T” of FIG. 36 (SEQ ID NO:577), in addition to any combination thereof. The present invention also encompasses the polypeptide at amino acid position 138 as being either an “Arg” or “Cys” of FIG. 36 SEQ ID NO:578.

[0073] FIGS. 37A-D show the polynucleotide sequence (SEQ ID NO: 842) and deduced amino acid sequence (SEQ ID NO:843) of the human angiotension converting enzyme 2 protein variant, ACE2-T2173C (SNP_ID: AE109s7) of the present invention. The standard one-letter abbreviation for amino acids is used to illustrate the deduced amino acid sequence. The polynucleotide sequence contains a sequence of 3405 nucleotides (SEQ ID NO: 842), encoding a polypeptide of 805 amino acids (SEQ ID NO:843). The predicted ‘T’ to ‘C.’ polynucleotide polymorphism is located at nucleic acid 2173 of SEQ ID NO:842 and is represented in bold. The polymorphism is a silent mutation and does not change the amino acid sequence of the encoded polypeptide.

[0074] FIGS. 38A-D show the polynucleotide sequence (SEQ ID NO: 844) and deduced amino acid sequence (SEQ ID NO:845) of the human bradykinin receptor B2 protein comprising, or alternatively consisting of, one or more of the predicted polynucleotide polymorphic loci, in addition to, the encoded polypeptide polymorphic loci of the present invention for this particular protein, which include but are not limited to the following polynucleotide polymorphisms: BDKRB2-C40T (SNP_ID: AE104s19), BDKRB2-T933C (SNP-ID: AE104s24), BDKRB2-G1061A (SNP_ID: AE104s25), and/or BDKRB2-A47C (SNP_ID: AE104s31); and polypeptide polymorphism—BDKRB2-R14C (SNP_ID: AE104s19), BDKRB2-G354E (SNP_ID: AE104s25), and/or BDKRB2-D16A (SNP_ID: AE104s31). The standard one-letter abbreviation for amino acids is used to illustrate the deduced amino acid sequence. The polynucleotide sequence contains a sequence of 3733 nucleotides (SEQ ID NO:844), encoding a polypeptide of 391 amino acids (SEQ ID NO:845). The polynucleotide polymorphic sites are represented by an “N”, in bold. The polypeptide polymorphic sites are represented by an “X”, in bold. The present invention encompasses the polynucleotide at nucleotide position 40 as being either a “C” or a “T”, the polynucleotide at nucleotide position 933 as being either a “T” or a “C”, the polynucleotide at nucleotide position 1061 as being either a “G” or an “A”, and/or the polynucleotide at nucleotide position 1061 as being either an “A” or a “C” of FIGS. 38A-D (SEQ ID NO:844), in addition to any combination thereof. The present invention also encompasses the polypeptide at amino acid position 14 as being either an “Arg” or “Cys”, the polypeptide at amino acid position 354 as being either a “Gly” or “Glu”, and/or the polypeptide at amino acid position 16 as being either a “Asp” or “Ala” of FIGS. 38A-D SEQ ID NO:845, in addition to any combination thereof.

[0075] FIG. 39 illustrates an example of the possible haplotypes (A, B, C, and D) for an individual that has the following genotype at a particular genomic locus: A/G heterozygote at SNP1, G/C heterozygote at SNP2, and A/C heterozygote at SNP3.

[0076] FIG. 40 illustrates an example of how the haplotype of an individual at a particular genomic locus can be determined using a combination of the individuals genotype with the genotypes of the individuals parents genotypes at the same locus. The example is based upon one parent having an A/A genotype at SNP1, a G/C genotype at SNP2, and an A/A genotype at SNP3, and the other parent having an A/G genotype at SNP1, C/C genotype at SNP2, and C/C genotype at SNP3, and the child being heterozygote at all three SNPs. As shown, there is only one possible haplotype combination. The later is based upon the absence of a crossing over event at this locus during meiosis.

[0077] FIGS. 41A-D show the polynucleotide sequence (SEQ ID NO: 846) and deduced amino acid sequence (SEQ ID NO:847) of the human aminopeptidase P protein variant, XPNPEP2-T711C (SNP_ID: AE100s30) of the present invention. The standard one-letter abbreviation for amino acids is used to illustrate the deduced amino acid sequence. The polynucleotide sequence contains a sequence of 3428 nucleotides (SEQ ID NO:846), encoding a polypeptide of 673 amino acids (SEQ ID NO:847). The predicted ‘T’ to ‘C’ polynucleotide polymorphism is located at nucleic acid 711 of SEQ ID NO:846 and is represented in bold. The polymorphism is a silent mutation and does not change the amino acid sequence of the encoded polypeptide.

[0078] FIGS. 42A-B show the polynucleotide sequence (SEQ ID NO: 848) and deduced amino acid sequence (SEQ ID NO:849) of the human bradykinin receptor B1 protein variant, BDKRB1-G728A (SNP_ID: AE103s10) of the present invention. The standard one-letter abbreviation for amino acids is used to illustrate the deduced amino acid sequence. The polynucleotide sequence contains a sequence of 1082 nucleotides (SEQ ID NO:848), encoding a polypeptide of 353 amino acids (SEQ ID NO:849). The predicted ‘G’ to ‘A’ polynucleotide polymorphism is located at nucleic acid 728 of SEQ ID NO:848 and is represented in bold. The polymorphism is a missense mutation resulting in a change in an encoding amino acid from ‘R’ to ‘Q’ at amino acid position 241 of SEQ ID NO: 849 and is represented by underlining.

[0079] FIGS. 43A-D show the polynucleotide sequence (SEQ ID NO: 850) and deduced amino acid sequence (SEQ ID NO:851) of the human bradykinin receptor B2 protein variant, BDKRB2-A47C (SNP_ID: AE104s31) of the present invention. The standard one-letter abbreviation for amino acids is used to illustrate the deduced amino acid sequence. The polynucleotide sequence contains a sequence of 3733 nucleotides (SEQ ID NO:850), encoding a polypeptide of 391 amino acids (SEQ ID NO:851). The predicted ‘A’ to ‘C’ polynucleotide polymorphism is located at nucleic acid 47 of SEQ ID NO:850 and is represented in bold. The polymorphism is a missense mutation resulting in a change in an encoding amino acid from ‘D’ to ‘A’ at amino acid position 16 of SEQ ID NO:851 and is represented by underlining.

[0080] FIGS. 44A-B show the polynucleotide sequence (SEQ ID NO: 852) and deduced amino acid sequence (SEQ ID NO:853) of the human proteinase inhibitor 4 protein variant, SERPINA4-C1143G (SNP_ID: AE110s10) of the present invention. The standard one-letter abbreviation for amino acids is used to illustrate the deduced amino acid sequence. The polynucleotide sequence contains a sequence of 1284 nucleotides (SEQ ID NO:852), encoding a polypeptide of 427 amino acids (SEQ ID NO:853). The predicted ‘C’ to ‘G’ polynucleotide polymorphism is located at nucleic acid 1143 of SEQ ID NO:852 and is represented in bold. The polymorphism is a silent mutation and does not change the amino acid sequence of the encoded polypeptide.

[0081] FIGS. 45A-B show the polynucleotide sequence (SEQ ID NO: 854) and deduced amino acid sequence (SEQ ID NO:855) of the human protease inhibitor 4 protein variant, SERPINA4-C412T (SNP_ID: AE110s11) of the present invention. The standard one-letter abbreviation for amino acids is used to illustrate the deduced amino acid sequence. The polynucleotide sequence contains a sequence of 1284 nucleotides (SEQ ID NO:854), encoding a polypeptide of 427 amino acids (SEQ ID NO:855). The predicted ‘C’ to ‘T’ polynucleotide polymorphism is located at nucleic acid 412 of SEQ ID NO:854 and is represented in bold. The polymorphism is a missense mutation resulting in a change in an encoding amino acid from ‘R’ to ‘C’ at amino acid position 138 of SEQ ID NO:855 and is represented by underlining.

[0082] FIGS. 46A-D show the polynucleotide sequence (SEQ ID NO: 856) and deduced amino acid sequence (SEQ ID NO:857) of the human aminopeptidase P protein comprising, or alternatively consisting of, one or more of the predicted polynucleotide polymorphic loci, in addition to, the encoded polypeptide polymorphic loci of the present invention for this particular protein, which include but are not limited to the following polynucleotide polymorphisms: XPNPEP2-C2085G (SNP_ID: AE100s1), and/or XPNPEP2-T711 C (SNP_ID: AE100s30). The standard one-letter abbreviation for amino acids is used to illustrate the deduced amino acid sequence. The polynucleotide sequence contains a sequence of 3428 nucleotides (SEQ ID NO:856), encoding a polypeptide of 673 amino acids (SEQ ID NO:857). The polynucleotide polymorphic sites are represented by an “N”, in bold. The present invention encompasses the polynucleotide at nucleotide position 2085 as being either a “C” or a “G”, and/or the polynucleotide at nucleotide position 711 as being either a “T” or a “C” of FIGS. 46A-D (SEQ ID NO:856), in addition to any combination thereof.

[0083] Table I provides a summary of the novel polypeptides and their encoding polynucleotides of the present invention.

[0084] Table II illustrates the preferred hybridization conditions for the polynucleotides of the present invention. Other hybridization conditions may be known in the art or described elsewhere herein.

[0085] Table III summarizes the single nucleotide polymorphisms (SNPs) of the present invention. ‘Gene Name’ refers to the gene in which the SNP resides; ‘Coriell DNA Panel(s)’ represents the Coriell DNA panel(s) from which the DNA samples were isolated in preparation for identifying the SNPs of the present invention for each gene (‘AA’ refers to the number of DNA samples out of the total DNA samples referenced for each gene which were of African American descent, while ‘CAU’ refers to the number of DNA samples out of the total DNA samples referenced for each gene which were of Caucasian descent)—the ‘47’ panel refers to the number of samples used from the HD50AA Panel, while the ‘95’ refers to the number of samples used form the HD100CAU Panel; ‘Total SNPs’ refers to the number of SNPs identified within each of the analyzed genes; ‘Misense’and ‘Silent’ refer to the number of SNPs that either changed or did not change the amino acid sequence of the encoded polypeptide for each gene, respectfully; and ‘UTR’ and ‘Intronic’ refer to the number of SNPs which were found either within the “untranslated region” or “intronic” region of the polynucleotide sequences of each gene, respectfully. Table IV provides a detailed summary of the SNPs of the present invention (SEQ ID NO:37 to 162; 579 to 642; and 858 to 909). ‘GENE_DESCRIPTION’ refers to the gene in which the SNP resides; ‘HGNC_ID’ refers to the gene symbol as designated by the HUGO Gene Nomenclature Committee; ‘SNP_ID’ refers to the unique name identifier associated with the SNP of the present invention; ‘CONTIG_NUM’ refers to the experimental sequence information of the contig in which the SNP was identified; ‘CONTIG_POS’ refers to the polynucleotide position within the experimental sequence contig at which the SNP resides; ‘FLANK SEQ’ provides the genomic polynucleotide sequence of the gene immediately flanking the SNP—each sequence provides the reference (REF) and variable (ALT) nucleic acid residue at the polymorphic site according to the following format: 5′ Flanking polynucleotide sequence [REF/ALT] 3′ flanking polynucleotide sequence; ‘FLANK_SEQ REF (SEQ ID NO: )’ refers to the SEQ ID NO of the genomic polynucleotide sequence comprising the reference nucleic acid sequence within the Sequence Listing of the present invention; ‘FLANK SEQ ALT (SEQ ID NO: )’ refers to the SEQ ID NO of the genomic polynucleotide sequence comprising the variable nucleic acid sequence within the Sequence Listing of the present invention; ‘REF_SEQ-ID’ refers to the Genbank Accession number of the reference genomic polynucleotide sequence in which the SNP resides, and which was used to design resequencing assays; ‘REF_SEQ_POS’ refers to the nucleotide position within the reference genomic polynucleotide sequence (REF_SEQ-ID) in which the polymorphism (SNP) resides; ‘REF_NT’ refers to the reference polymorphic nucleotide (SNP) allele within the reference genomic polynucleotide sequence; ‘ALT_NT’ refers to the variant polymorphic nucleotide (SNP) allele within the reference genomic polynucleotide sequence; ‘REF_NT’ identifies the reference polymorphic nucleotide (SNP) allele within the reference genomic polynucleotide sequence; ‘ALT_NT’ identifies the variable polymorphic nucleotide (SNP) allele within the reference genomic polynucleotide sequence; ‘EXON’ refers to the location of the polymorphic nucleotide allele (SNP) within the gene structure of the referenced genomic polynucleotide sequence (putative exonlintron number) as determined using software programs well known in the art (e.g., BLAST2, Sim4, and/or GRAIL, etc.); ‘MUTATION_TYPE’ refers to the type of polymorphism according to the following classification: Missense—an SNP within the coding region of a gene resulting in a change in the encoded amino acid sequence, Silent—an SNP within the coding region of a gene but does not result in a change in the encoded amino acid sequence, and Non-CDS: an SNP that is located within the non-coding region (e.g., intron, untranslated region) of a gene; ‘REVCOMP’ refers to the relative 5′ to 3′ orientation of the reference genomic polynucleotide sequence compared to the cDNA polynucleotide sequence of the gene wherein ‘0’ indicates the genomic and cDNA sequences are in the same orientation, whereas ‘1′ indicates the genomic and cDNA sequences are in an opposing orientation; ‘REF_CODON’ refers to the reference nucleotide sequence of the codon in which the encoding SNPs reside; ‘ALT_CODON’ refers to the variable nucleotide sequence of the codon in which the encoding SNPs reside; ‘cDNA_SEQ_ID’ refers to the Genbank Accession Number for the cDNA gene sequence in which the SNP resides; and ‘cDNA_SEQ_POS′ refers to the nucleotide position of the SNP within the polynucleotide sequence of the cDNA;

[0086] Table V provides a detailed summary of the SNPs of the present invention comprising additional 5′ and 3′ flanking genomic sequence (SEQ ID NO:163 to 288; 643 to 706; and 910 to 961, and 1574 to 1575). The Table headings are the same as in Table IV with the following exceptions: ‘REFSEQ_FLANK’ provides the genomic polynucleotide sequence of the gene flanking the SNP—each sequence provides the reference (REF) and variable (ALT) nucleic acid residue at the polymorphic site according to the following format: 5′ Flanking polynucleotide sequence [REF/ALT] 3′ flanking polynucleotide sequence; ‘REFSEQ_FLANK_ORIENT ’ refers to the relative orientation (sense or antisense, 5′ to 3′ or 3′ to 5′) of the REFSEQ_FLANK polynucletide sequence with respect to the FLANK_SEQ polynucletide orientation wherein a “0” refers to the FLANK_SEQ and REFSEQ_FLANK polynucleotide sequences having the same orientation, as opposed to a “1” wherein the FLANK_SEQ and REFSEQ_FLANK polynucleotide sequences have an opposing orientation; ‘REFSEQ_FLANK REF (SEQ ID NO: )’ refers to the SEQ ID NO of the genomic polynucleotide sequence comprising the reference nucleic acid sequence within the Sequence Listing of the present invention; and ‘REFSEQ_FLANK ALT (SEQ ID NO: )’ refers to the SEQ ID NO of the genomic polynucleotide sequence comprising the variable nucleic acid sequence within the Sequence Listing of the present invention. The SNP sequences disclosed in Table V are preferred and should be relied upon in the instance of any sequence discrepancies herein.

[0087] Table VI provides a detailed summary of the SNPs of the present invention which fall within the coding region of the captioned genes. The Table headings are the same as in Table fV and V with the following exceptions: ‘REF_AA’ refers to the reference amino acid within the reference protein sequence within which an encoding SNP of the present invention resides; ‘ALT_AA’ refers to the variant amino acid within the reference protein sequence affected by an encoding SNP of the present invention; ‘PROTEIN_ID’ refers to the Genbank Accession Number of the reference protein sequence; ‘PROTEIN_POS’ refers to the amino acid location affected by the encoding SNP within the reference protein sequence.

[0088] Table VIIA-D provides the DNA panel, Catalog Number, and ethnicity of each of the Coriell DNA samples (Coriell Institute, Collingswood, N.J.) used in identifying the SNPs of the present invention, in addition to, the DNA samples obtained from patients participating in a Bristol-Myers Squibb omapatrilat clinical trial. The table also identifies which DNA samples were used in identifying the SNPs within each respective gene.

[0089] Table VIII provides a detailed summary of the various PCR primers that were used in amplifying relevant regions of the andioedema candidate genes for single nucleotide polymorphism analysis. The Table headings are the same as in Table IV and V above with the following exceptions: ‘PCR Amplicon_Name’ refers to the name given to product of the PCR amplified DNA; ‘Target_Name’ refers to the name of the region of genomic DNA for each gene which was targeted for PCR amplification; ‘PCR Left primer’ refers to the 5′ primer used to amplify the target; ‘PCR Left primer (SEQ ID NO:)’ refers to the SEQ ID NO for this particular sequence within the Sequence Listing of the present invention; ‘PCR Right primer’ refers to the 3′ primer used to amplify the target; and ‘PCR Right primer (SEQ ID NO:)’ refers to the SEQ ID NO for this particular sequence within the Sequence Listing of the present invention.

[0090] Table IX provides a detailed summary of the various sequencing primers that were used in sequencing relevant regions of the andioedema candidate genes (e.g., PCR Amplicons of Table VIM for single nucleotide polymorphism analysis. The Table headings are the same as in Table IV, V, and VIII above with the following exceptions: ‘Forward sequencing primer’ refers to the 3′ (forward) primer used for sequencing across the PCR amplicon; ‘forward seq name’ refers to the name given to the resulting forward sequence for a particular PCR amplicon; ‘Forward sequencing primer (SEQ ID NO:)’ refers to the SEQ ID NO for this particular sequence within the Sequence Listing of the present invention; ‘Reverse sequencing primer’ refers to the 5′ (reverse) primer used for sequencing across the PCR amplicon; ‘reverse seq name’ refers to the name given to the resulting reverse sequence for a particular PCR amplicon; and ‘Reverse sequencing primer (SEQ ID NO:)’ refers to the SEQ ID NO for this particular sequence within the Sequence Listing of the present invention.

[0091] Table X provides a detailed summary of the various primers that were used in genotyping the single nucleotide polymorphisms of the angioedema candidate genes of the present invention for identifying their putative association to the angioedema phenotype. The Table headings are the same as in Table IV, V, and VEII above with the following exceptions: ‘ORCHID_LEFT’ refers to the 3′ (forward) primer used for sequencing across the SNP loci of each respective SNP; ‘ORCHID_LEFT’ (SEQ ID NO:)’ refers to the SEQ ID NO for this particular sequence within the Sequence Listing of the present invention; ‘ORCHID_RIGHT’ refers to the 5′ (reverse) primer used for sequencing across the SNP loci of each respective SNP; ‘ORCHID_RIGHT’ (SEQ ID NO:)’ refers to the SEQ ID NO for this particular sequence within the Sequence Listing of the present invention; ‘ORCHID_SNPIT’ refers to the hybridization oligonucleotide used for single base extension; ‘ORCHID_SNPIT’ refers to the SEQ ID NO for this particular sequence within the Sequence Listing of the present invention.

[0092] Table XI provides a detailed summary of the various primers that may be used in genotyping the single nucleotide polymorphisms of the angioedema candidate genes of the present invention for identifying their putative association to the angioedema phenotype using the alternative GBS method described herein. The Table headings are the same as in Table IV, V, and VIII above with the following exceptions: ‘GBS_LEFT’ refers to the 3′ (forward) primer that may be used for sequencing across the SNP loci of each respective SNP; ‘GBS-LEFT (SEQ ID NO:)’ refers to the SEQ ID NO for this particular sequence within the Sequence Listing of the present invention; ‘GBS_RIGHT’ refers to the 5′ (reverse) primer that may be used for sequencing across the SNP loci of each respective SNP; and ‘GBS_RIGHT (SEQ ID NO:)’ refers to the SEQ ID NO for this particular sequence within the Sequence Listing of the present invention.

[0093] Table XII provides a summary of the various DNA samples, in addition to their ethnic origin and disease phenotype, used in the genotyping the single nucleotide polymorphisms of the angioedema candidate genes of the present invention for identifying their putative association to the angioedema phenotype.

[0094] Table XIII provides a summary of the specific angioedema candidate genes that were genotyped using genotyping assays designed for the single nucleotide polymorphisms of the present invention within these genes.

[0095] Table XIV provides a summary of the statistical association of the single nucleotide polymorphisms of the present invention with angioedema and/or angioedema-like events.

### DETAILED DESCRIPTION OF THE INVENTION

[0096] The present invention relates to a nucleic acid molecule which comprises a single nucleotide polymorphism (SNP) at a specific location. The nucleic acid molecule, e.g., a gene, which includes the SNP has at least two alleles, referred to herein as the reference allele and the variant allele. The reference allele (prototypical or wild type allele) has been designated arbitrarily and typically corresponds to the nucleotide sequence of the native form of the nucleic acid molecule. The variant allele differs from the reference allele by one nucleotide at the site(s) identified in the Table IV, V, and/or VI. The present invention also relates to variant alleles of the described genes and to complements of the variant alleles. The invention further relates to portions of the variant alleles and portions of complements of the variant alleles which comprise (encompass) the site of the SNP and are at least nucleotides in length. Portions can be, for example, 5-10,5-15, .10-20,5-25, 10-30, 10- or 10-100 bases long. F or example, a portion of a variant allele which is nucleotides in length includes the single nucleotide polymorphism (the nucleotide which differs from the reference allele at that site) and twenty additional nucleotides which flank the site in the variant allele. These additional nucleotides can be on one or both sides of the polymorphism. Polymorphisms which are the subject of this invention are defined in Table IV, V, or VI herein.

[0097] For example, the invention relates to a portion of a gene (e.g., bradykinin receptor B1 (BDKRB1) having a nucleotide sequence according to FIGS. 4A-B (SEQ ID NO:7) comprising a single nucleotide polymorphism at a specific position (e.g., nucleotide 956). The reference nucleotide for this polymorphic form of BDKRB1 is shown in the ‘FLANK_SEQ (REF/ALT)’ column as the “REF” nucleotide (in this case, the “REF” nucletide is “G”) of Table IV, and the variant nucleotide is shown in the ‘FLANK_SEQ (REF/ALT)’ column as the “ALT” nucleotide of Table IV (in this case,the “ALT” nucleotide is an “A”). In a preferred embodiment, the nucleic acid molecule of the invention comprises the variant (alternate) nucleotide at the polymorphic position. For example, the invention relates to a nucleic acid molecule which comprises the nucleic acid sequence shown in the ‘FLANK_SEQ (REF/ALT)’ as the “ALT” nucleotide in Table IV having an “A” at nucleotide position 956 of FIGS. 4A-B (SEQ ID NO:7). The nucleotide sequences of the invention can be double- or single- stranded.

[0098] The invention further provides allele-specific oligonucleotides that hybridize to a gene comprising a single nucleotide polymorphism or to the complement of the gene. Such oligonucleotides will hybridize to one polymorphic form of the nucleic acid molecules described herein but not to the other polymorphic form(s) of the sequence. Thus, such oligonucleotides can be used to determine the presence or absence of particular alleles of the polymorphic sequences described herein. These oligonucleotides can be probes or primers.

[0099] The invention further provides a method of analyzing a nucleic acid from an individual. The method determines which base is present at any one of the polymorphic sites shown in Tables I, IV, V, or VI. Optionally, a set of bases occupying a set of the polymorphic sites shown in Tables I, IV, V, or VI is determined. This type of analysis can be performed on a number of individuals, who are also tested (previously, concurrently or subsequently) for the presence of a disease phenotype. The presence or absence of disease phenotype is then correlated with a base or set of bases present at the polymorphic site or sites in the individuals tested.

[0100] Thus, the invention further relates to a method of predicting the presence, absence, likelihood of the presence or absence, or severity of a particular phenotype or disorder associated with a particular genotype. The method comprises obtaining a nucleic acid sample from an individual and determining the identity of one or more bases (nucleotides) at polymorphic sites of nucleic acid molecules described herein, wherein the presence of a particular base is correlated with a specified phenotype or disorder, thereby predicting the presence, absence, likelihood of the presence or absence, or severity of the phenotype or disorder in the individual. The correlation between a particular polymorphic form of agene and a phenotype can thus be used in methods of diagnosis of that phenotype, as well as in the development of treatments for the phenotype.

### DEFINITIONS

[0101] An oligonucleotide can be DNA or RNA, and single- or double-stranded. Oligonucleotides can be naturally occurring or synthetic, but are typically prepared by synthetic means. Preferred oligonucleotides of the invention include segments of DNA, or their complements, which include any one of the polymorphic sites shown or described in Tables I, IV, V, or VI. The segments can be between and 250 bases, and, in specific embodiments, are between 5-10,5-20, 10-20, 10-50,20-50 or 10-100 bases. For example, the segment can be bases. The polymorphic site can occur within any position of the segment. The segments can be from any of the allelic forms of DNA shown or described in Tables I, IV, V, or VI.

[0102] As used herein, the terms “nucleotide”, “base” and “nucleic acid” are intended to be equivalent. The terms “nucleotide sequence”, “nucleic acid sequence”, “nucleic acid molecule” and “segment” are intended to be equivalent.

[0103] Hybridization probes are oligonucleotides which bind in a base-specific manner to a complementary strand of nucleic acid. Such probes include peptide nucleic acids, as described in Nielsen et a/., Science 254, 1497-1500 (1991). Probes can be any length suitable for specific hybridization to the target nucleic acid sequence. The most appropriate length of the probe may vary depending upon the hybridization method in which it is being used; for example, particular lengths may be more appropriate for use in microfabricated arrays, while other lengths may be more suitable for use in classical hybridization methods. Such optimizations are known to the skilled artisan. Suitable probes and primers can range from about nucleotidesto about nucleotides in length. For example, probes and primers can be 5, 6, 8, 10, 12, 14, 16, 18, 20, 22, 24, 25, 26, or 40 nucleotides in length. The probe or primer preferably overlaps at least one polymorphic site occupied by any of the possible variant nucleotides. The nucleotide sequence can correspond to the coding seqllence of the allele or to the complement of the coding sequence of the allele.

[0104] As used herein, the term “primer” refers to a single-stranded oligonucleotide which acts as a point of initiation of template-directed DNA synthesis under appropriate conditions (e.g., in the presence of four different nucleoside triphosphates and an agent for polymerization, such as DNA or RNA polymerase or reverse transcriptase) in an appropriate buffer and at a suitable temperature. The appropriate length of a primer depends on the intended use of the primer, but typically ranges from to nucleotides. Short primer molecules generally require cooler temperatures to form sufficiently stable hybrid complexes with the template. A primer need not reflect the exact sequence of the template, but must be sufficiently complementary to hybridize with a template. The term primer site refers to the area of the target DNA to which a primer hybridizes. The term primer pair refers to a set of primers including a 5′ (upstream) primer that hybridizes with the 5′ end of the DNA sequence to be amplified and a 3′ (downstream) primer that hybridizes with the complement of the 3′ end of the sequence to be amplified.

[0105] As used herein, linkage describes the tendency of genes, alleles, loci or genetic markers to be inherited together as a result of their location on the same chromosome. It can be measured by percent recombination between the two genes, alleles, loci or genetic markers.

[0106] As used herein, polymorphism refers to the occurance of two or more genetically determined alternative sequences or alleles in a population. A polymorphic marker or site is the locus at which divergence occurs. Preferred markers have at least two alleles, each occurring at frequency of greater than 1%, and more preferably greater than 10% or 20% of a selected population. A polymorphic locus may be as small as one base pair. Polymorphic markers include restriction fragment length polymorphisms, variable number of tandem repeats (VNTR's), hypervariable regions, minisatellites, dinucleotide repeats, trinucleotide repeats, tetranucleotide repeats, simple sequence repeats, and insertion elements such as Alu. The first identified allelic form is arbitrarily designated as the reference form and other allelic forms are designated as alternative or variant alleles. The allelic form occurring most frequently in a selected population is sometimes referred to as the wild type form. Diploid organisms may be homozygous or heterozygous for allelic forms. A diallelic or biallelic polymorphism has two forms. A triallelic polymorphism has three forms.

[0107] Work described herein pertains to the resequencing of large numbers of genes in a large number of individuals to identify polymorphisms which may predispose individuals to disease. For example, polymorphisms in genes which are expressed in liver may predispose individuals to disorders of the liver. Likewise, polymorphisms in genes which are expressed in cardiovascular tissue may predispose individuals to disorders of the heart and/or circulatory system.

[0108] By altering amino acid sequence, SNPs may alter the function of the encoded proteins. The discovery of the SNP facilitates biochemical analysis of the variants and the development of assays to characterize the variants and to screen for pharmaceutical that would interact directly with on or another form of the protein. SNPs (including silent SNPs) may also alter the regulation of the gene at the transcriptional or post- transcriptional level. SNPs (including silent SNPs) also enable the development of specific DNA, RNA, or protein-based diagnostics that detect the presence or absence of the polymorphism in particular conditions.

[0109] A single nucleotide polymorphism occurs at a polymorphic site occupied by a single nucleotide, which is the site of variation between allelic sequences. The site is usually preceded by and followed by highly conserved sequences of the allele (e.g., sequences that vary in less than 1/100 or 1/1000 members of the populations).

[0110] A single nucleotide polymorphism usually arises due to substitution of one nucleotide for another at the polymorphic site. A transition is the replacement of one purine by another purine or one pyriridine by another pyrimidine. A transversion is the replacement of a purine by a pyrimidine or vice versa. Single nucleotide polymorphisms can also arise from a deletion of a nucleotide or an insertion of a nucleotide relative to a reference allele. Typically the polymorphic site is occupied by a base other than the reference base. For example, where the reference allele contains the base “T” at the polymorphic site, the altered allele can contain a “C”, “G” or All at the polymorphic site.

[0111] For the purposes of the present invention the terms “polymorphic position”, “polymorphic site”, “polymorphic locus”, and “polymorphic allele” shall be construed to be equivalent and are defined as the location of a sequence identified as having more than one nucleotide represented at that location in a population comprising at least one or more individuals, and/or chromosomes.

[0112] Hybridizations are usually performed under stringent conditions, for example, at a salt concentration of no more than 1 M and a temperature of at least 25° C. For example, conditions of 5X SSPE (750 mM NaCl, mM NaPhosphate, mM EDT A, pH 7.4) and a temperature of 25-30° C., or equivalent conditions, are suitable for allele-specific probe hybridizations. Equivalent conditions can be determined by varying one or more of the parameters given as an example, as known in the art, while maintaining a similar degree of identity or similarity between the target nucleotide sequence and the primer or probe used.

[0113] The term “isolated” is used herein to indicate that the material in question exists in a physical milieu distinct from that in which it occurs in nature, and thus is altered “by the hand of man” from its natural state. For example, an isolated nucleic acid of the invention may be substantially isolated with respect to the complex cellular milieu in which it naturally occurs. In some instances, the isolated material will form part of a composition (for example, a crude extract containing other substances), buffer system or reagent mix. In other circumstance, the material may be purified to essential homogeneity, for example as determined by PAGE or column chromatography such as HPLC. Preferably, an isolated nucleic acid comprises at least about 50, 80, or 90 percent (on a molar basis) of all macromolecular species present. For example, an isolated polynucleotide could be part of a vector or a composition of matter, or could be contained within a cell, and still be “isolated” because that vector, composition of matter, or particular cell is not the original environment of the polynucleotide. On one hand, the term “isolated” does not refer to genomic or cDNA libraries, whole cell total or mRNA preparations, genomic DNA preparations (including those separated by electrophoresis and transferred onto blots), sheared whole cell genomic DNA preparations or other compositions where the art demonstrates no distinguishing features of the polynucleotide/sequences of the present invention. On the other hand, in consideration of other embodiments of the present invention, specifically the single nucleotide polymorphisms of the present invention, the term “isolated” may refer to genomic or cDNA libraries, whole cell total or mRNA preparations, genomic DNA preparations (including those separated by electrophoresis and transferred onto blots), sheared whole cell genomic DNA preparations. However, the present invention is meant to encompass those compositions where the art demonstrates no distinguishing features of the polynucleotide/sequences of the present invention (e.g., the knowledge that a particular nucleotide position represents a polymorphic site, the knowledge of which allele represents the reference and/or variant nucleotide base, the association of a particular polymorphism with a disease or disorder, wherein such association was not appreciated heretofor, etc.).

[0114] One one hand, and in specific embodiments, the polynucleotides of the invention are at least 15, at least 30, at least 50, at least 100, at least 125, at least 500, or at least 1000 continuous nucleotides but are less than or equal to 300 kb, 200 kb, 100 kb, 50 kb, 15 kb, 10 kb, 7.5 kb, 5 kb, 2.5 kb, 2.0 kb, or 1 kb, in length. In a further embodiment, polynucleotides of the invention comprise a portion of the coding sequences, as disclosed herein, but do not comprise all or a portion of any intron. In another embodiment, the polynucleotides comprising coding sequences do not contain coding sequences of a genomic flanking gene (i.e., 5′ or 3′ to the gene of interest in the genome). In other embodiments, the polynucleotides of the invention do not contain the coding sequence of more than 1000, 500, 250, 100, 50, 25, 20, 15, 10, 5, 4, 3, 2, or 1 genomic flanking gene(s).

[0115] On the other hand, and in specific embodiments, the polynucleotides of the invention are at least 15, at least 30, at least 50, at least 100, at least 125, at least 500, or at least 1000 continuous nucleotides but are less than or equal to 300 kb, 200 kb, 100 kb, 50 kb, 15 kb, 10 kb, 7.5 kb, 5 kb, 2.5 kb, 2.0 kb, or 1 kb, in length. In a further embodiment, polynucleotides of the invention comprise a portion of the coding sequences, comprise a portion of non-coding sequences, comprise a portion of an intron sequence, etc., as disclosed herein. In another embodiment, the polynucleotides comprising coding sequences may correspond to a genomic sequence flanking a gene (i.e., 5′ or 3′ to the gene of interest in the genome). In other embodiments, the polynucleotides of the invention may contain the non-coding sequence of more than 1000, 500, 250, 100, 50, 25, 20, 15, 10, 5, 4, 3, 2, or 1 genomic flanking gene(s).

[0116] As used herein, a “polynucleotide” refers to a molecule having a nucleic acid sequence contained in SEQ ID NO:X. For example, the polynucleotide can contain the nucleotide sequence of the full length cDNA sequence, including the 5′ and 3′ untranslated sequences, the coding region, with or without a signal sequence, the secreted protein coding region, as well as fragments, epitopes, domains, and variants of the nucleic acid sequence. Moreover, as used herein, a “polypeptide” refers to a molecule having the translated amino acid sequence generated from the polynucleotide as broadly defined.

[0117] Unless otherwise indicated, all nucleotide sequences determined by sequencing a DNA molecule herein were determined using an automated DNA sequencer (such as the Model 373 from Applied Biosystems, Inc.), and all amino acid sequences of polypeptides encoded by DNA molecules determined herein were predicted by translation of a DNA sequence determined above. Therefore, as is known in the art for any DNA sequence determined by this automated approach, any nucleotide sequence determined herein may contain some errors. Nucleotide sequences determined by automation are typically at least about 90% identical, more typically at least about 95% to at least about 99.9% identical to the actual nucleotide sequence of the sequenced DNA molecule. The actual sequence can be more precisely determined by other approaches including manual DNA sequencing methods well known in the art. As is also known in the art, a single insertion or deletion in a determined nucleotide sequence compared to the actual sequence will cause a frame shift in translation of the nucleotide sequence such that the predicted amino acid sequence encoded by a determined nucleotide sequence will be completely different from the amino acid sequence actually encoded by the sequenced DNA molecule, beginning at the point of such an insertion or deletion.

[0118] Using the information provided herein, such as the nucleotide sequence in Figure(s) XX (SEQ ID NO:X), a nucleic acid molecule of the present invention encoding a polypeptide of the present invention may be obtained using standard cloning and screening procedures, such as those for cloning cDNAs using mRNA as starting material.

[0119] A “polynucleotide” of the present invention also includes those polynucleotides capable of hybridizing, under stringent hybridization conditions, to sequences contained in SEQ ID NO:X, or the complement thereof. “Stringent hybridization conditions” refers to an overnight incubation at 42 degree C. in a solution comprising 50% formamide, 5x SSC (750 mM NaCl, 75 mM trisodium citrate), 50 mM sodium phosphate (pH 7.6), 5x Denhardt's solution, 10% dextran sulfate, and 20 μg/ml denatured, sheared salmon sperm DNA, followed by washing the filters in 0.1x SSC at about 65 degree C.

[0120] Also contemplated are nucleic acid molecules that hybridize to the polynucleotides of the present invention at lower stringency hybridization conditions. Changes in the stringency of hybridization and signal detection are primarily accomplished through the manipulation of formamide concentration (lower percentages of formamide result in lowered stringency); salt conditions, or temperature. For example, lower stringency conditions include an overnight incubation at 37 degree C. in a solution comprising 6X SSPE (20X SSPE=3M NaCl; 0.2M NaH2PO4; 0.02M EDTA, pH 7.4), 0.5% SDS, 30% formamide, 100 ug/ml salmon sperm blocking DNA; followed by washes at 50 degree C. with 1XSSPE, 0.1% SDS. In addition, to achieve even lower stringency, washes performed following stringent hybridization can be done at higher salt concentrations (e.g. 5X SSC).

[0121] Note that variations in the above conditions may be accomplished through the inclusion and/or substitution of alternate blocking reagents used to suppress background in hybridization experiments. Typical blocking reagents include Denhardt's reagent, BLOTTO, heparin, denatured salmon sperm DNA, and commercially available proprietary formulations. The inclusion of specific blocking reagents may require modification of the hybridization conditions described above, due to problems with compatibility.

[0122] Of course, a polynucleotide which hybridizes only to polyA+sequences (such as any 3′ terminal polyA+tract of a cDNA shown in the sequence listing), or to a complementary stretch of T (or U) residues, would not be included in the definition of “polynucleotide,” since such a polynucleotide would hybridize to any nucleic acid molecule containing a poly (A) stretch or the complement thereof (e.g., practically any double-stranded cDNA clone generated using oligo dT as a primer).

[0123] The polynucleotide of the present invention can be composed of any polyribonucleotide or polydeoxribonucleotide, which may be unmodified RNA or DNA or modified RNA or DNA. For example, polynucleotides can be composed of single- and double-stranded DNA, DNA that is a mixture of single- and double-stranded regions, single- and double-stranded RNA, and RNA that is mixture of single- and double-stranded regions, hybrid molecules comprising DNA and RNA that may be single-stranded or, more typically, double-stranded or a mixture of single-and double-stranded regions. In addition, the polynucleotide can be composed of triple-stranded regions comprising RNA or DNA or both RNA and DNA. A polynucleotide may also contain one or more modified bases or DNA or RNA backbones modified for stability or for other reasons. “Modified” bases include, for example, tritylated bases and unusual bases such as inosine. A variety of modifications can be made to DNA and RNA; thus, “polynucleotide” embraces chemically, enzymatically, or metabolically modified forms.

[0124] The polypeptide of the present invention can be composed of amino acids joined to each other by peptide bonds or modified peptide bonds, i.e., peptide isosteres, and may contain amino acids other than the 20 gene-encoded amino acids. The polypeptides may be modified by either natural processes, such as posttranslational processing, or by chemical modification techniques which are well known in the art. Such modifications are well described in basic texts and in more detailed monographs, as well as in a voluminous research literature. Modifications can occur anywhere in a polypeptide, including the peptide backbone, the amino acid side-chains and the amino or carboxyl termini. It will be appreciated that the same type of modification may be present in the same or varying degrees at several sites in a given polypeptide. Also, a given polypeptide may contain many types of modifications. Polypeptides may be branched, for example, as a result of ubiquitination, and they may be cyclic, with or without branching. Cyclic, branched, and branched cyclic polypeptides may result from posttranslation natural processes or may be made by synthetic methods. Modifications include acetylation, acylation, ADP-ribosylation, amidation, covalent attachment of flavin, covalent attachment of a heme moiety, covalent attachment of a nucleotide or nucleotide derivative, covalent attachment of a lipid or lipid derivative, covalent attachment of phosphotidylinositol, cross-linking, cyclization, disulfide bond formation, demethylation, formation of covalent cross-links, formation of cysteine, formation of pyroglutamate, formylation, gamma-carboxylation, glycosylation, GPI anchor formation, hydroxylation, iodination, methylation, myristoylation, oxidation, pegylation, proteolytic processing, phosphorylation, prenylation, racemization, selenoylation, sulfation, transfer-RNA mediated addition of amino acids to proteins such as arginylation, and ubiquitination. (See, for instance, PROTEINS - STRUCTURE AND MOLECULAR PROPERTIES, 2nd Ed., T. E. Creighton, W. H. Freeman and Company, New York (1993); POSTTRANSLATIONAL COVALENT MODIFICATION OF PROTEINS, B. C. Johnson, Ed., Academic Press, New York, pgs. 1-12 (1983); Seifter et al., Meth Enzymol 182:626-646 (1990); Rattan et al., Ann NY Acad Sci 663:48-62 (1992).)

[0125] “SEQ ID NO:X” refers to a polynucleotide sequence while “SEQ ID NO:Y” refers to a polypeptide sequence, both sequences identified by an integer specified in Table I, and/or in Table IV, V, or VI.

[0126] “A polypeptide having biological activity” refers to polypeptides exhibiting activity similar, but not necessarily identical to, an activity of a polypeptide of the present invention, including mature forms, as measured in a particular biological assay, with or without dose dependency. In the case where dose dependency does exist, it need not be identical to that of the polypeptide, but rather substantially similar to the dose-dependence in a given activity as compared to the polypeptide of the present invention (i.e., the candidate polypeptide will exhibit greater activity or not more than about 25-fold less and, preferably, not more than about tenfold less activity, and most preferably, not more than about three-fold less activity relative to the polypeptide of the present invention.)

[0127] The term “organism” as referred to herein is meant to encompass any organism referenced herein, though preferably to eukaryotic organsisms, more preferably to mammals, and most preferably to humans.

[0128] The present invention encompasses the identification of proteins, nucleic acids, or other molecules, that bind to polypeptides and polynucleotides of the present invention (for example, in a receptor-ligand interaction). The polynucleotides of the present invention can also be used in interaction trap assays (such as, for example, that described by Ozenberger and Young (Mol Endocrinol., 9(10):1321-9, (1995); and Ann. N. Y. Acad. Sci., 7;766:279-81, (1995)).

[0129] The polynucleotide and polypeptides of the present invention are useful as probes for the identification and isolation of full-length cDNAs and/or genomic DNA which correspond to the polynucleotides of the present invention, as probes to hybridize and discover novel, related DNA sequences, as probes for positional cloning of this or a related sequence, as probe to “subtract-out” known sequences in the process of discovering other novel polynucleotides, as probes to quantify gene expression, and as probes for microarrays.

[0130] In addition, polynucleotides and polypeptides of the present invention may comprise one, two, three, four, five, six, seven, eight, or more membrane domains.

[0131] Also, in preferred embodiments the present invention provides methods for further refining the biological function of the polynucleotides and/or polypeptides of the present invention.

[0132] Specifically, the invention provides methods for using the polynucleotides and polypeptides of the invention to identify orthologs, homologs, paralogs, variants, and/or allelic variants of the invention. Also provided are methods of using the polynucleotides and polypeptides of the invention to identify the entire coding region of the invention, non-coding regions of the invention, regulatory sequences of the invention, and secreted, mature, pro-, prepro-, forms of the invention (as applicable).

[0133] In preferred embodiments, the invention provides methods for identifying the glycosylation sites inherent in the polynucleotides and polypeptides of the invention, and the subsequent alteration, deletion, and/or addition of said sites for a number of desirable characteristics which include, but are not limited to, augmentation of protein folding, inhibition of protein aggregation, regulation of intracellular trafficking to organelles, increasing resistance to proteolysis, modulation of protein antigenicity, and mediation of intercellular adhesion.

[0134] In further preferred embodiments, methods are provided for evolving the polynucleotides and polypeptides of the present invention using molecular evolution techniques in an effort to create and identify novel variants with desired structural, functional, and/or physical characteristics.

[0135] The present invention further provides for other experimental methods and procedures currently available to derive functional assignments. These procedures include but are not limited to spotting of clones on arrays, micro-array technology, PCR based methods (e.g., quantitative PCR), anti-sense methodology, gene knockout experiments, and other procedures that could use sequence information from clones to build a primer or a hybrid partner.

### Polynucleotides and Polypeptides of the Invention

[0136] Features of the Polypeptide Encoded by Gene No:1

[0137] The present invention relates to isolated nucleic acid molecules comprising, or alternatively, consisting of all or a portion of the variant allele of the human amino peptidase gene (e.g., wherein reference or wildtype amino peptidase gene is exemplified by SEQ ID NO:1). Preferred portions are at least 10, preferably at least 20, preferably at least 40, preferably at least 100, contiguous polynucleotides and comprise a “G” at the nucleotide position corresponding to nucleotide 2085 of the amino peptidase gene, or a portion of SEQ ID NO:3. Alternatively, preferred portions are at least 10, preferably at least 20, preferably at least 40, preferably at least 100, contiguous polynucleotides and comprise a “C” at the nucleotide position corresponding to nucleotide 2085 of the amino peptidase gene, or a portion of SEQ ID NO:3. The invention further relates to isolated gene products, e.g., polypeptides and/or proteins, which are encoded by a nucleic acid molecule comprising all or a portion of the variant allele of the amino peptidase gene.

[0138] In one embodiment, the invention relates to a method for predicting the likelihood that an individual will have a disorder associated with a “G” at the nucleotide position corresponding to nucleotide position 2085 of SEQ ID NO:3 (or diagnosing or aiding in the diagnosis of such a disorder) comprising the steps of obtaining a DNA sample from an individual to be assessed and determining the nucleotide present at position 2085 of SEQ ID NO:3. The presence of a “G” at this position indicates that the individual has a greater likelihood of having a disorder associated therewith than an individual having a “C” at that position, or a greater likelihood of having more severe symptoms.

[0139] Conversely, the invention relates to a method for predicting the likelihood that an individual will have a disorder associated with a “C” at the nucleotide position corresponding to nucleotide position 2085 of SEQ ID NO:3 (or diagnosing or aiding in the diagnosis of such a disorder) comprising the steps of obtaining a DNA sample from an individual to be assessed and determining the nucleotide present at position 2085 of SEQ ID NO:3. The presence of a “C” at this position indicates that the individual has a greater likelihood of having a disorder associated therewith than an individual having a “G” at that position, or a greater likelihood of having more severe symptoms.

[0140] Representative disorders which may be detected, diagnosed, identified, treated, prevented, and/or ameliorated by the present invention include, the following, non-limiting diseases and disorders: angioedema, cardiovascular diseases, angina pectoris, hypertension, heart failure, myocardial infarction, ventricular hypertrophy, cough associated with ACE inhibitors, cough associated with vasopeptidase inhibitors, vascular diseases, miscrovascular disease, vascular leak syndrome, aneurysm, stroke, embolism, thrombosis, endothelial dysfunction, coronary artery disease, arteriosclerosis, and/or atherosclerosis.

[0141] Additional disorders which may be detected, diagnosed, identified, treated, prevented, and/or ameliorated by the present invention include, the following, non-limiting diseases and disorders: hypotensive reactions during blood transfusions (Transfusion. 1999 Oct;39(10):1084-8.), hypersensitivity reactions during hemodialysis (Peptides. 1999;20(4):421-30.), sepsis, inflammatory arthritis, and enterocolitis (Clin Rev Allergy Immunol. 1998 Winter; 16(4):365-84.), enterocolitis (Gut. 1998 Sep;43(3):365-74.), chronic granulomatous intestinal and systemic inflammation (FASEB J. 1998 Mar;12(3):325-33.), peptidoglycan-induced arthritis (Arthritis Rheum. 1997 Jul;40(7):1327-33.), arthritis (Proc Assoc Am Physicians. 1997 Jan; 109(1):10-22.), intestinal inflammation (Dig Dis Sci. 1996 May;41(5):912-20.), acute phase response of inflammation (Peptides. 1996; 17(7):1163-70.), asthma (J Appl Physiol 1995; 78: 1844-1852), chronic obstructive pulmonary disease (COPD), cough reflex, allergies, and/or neurogenic inflammation.

[0142] Features of the Polypeptide Encoded by Gene No:2

[0143] The present invention relates to isolated nucleic acid molecules comprising, or alternatively, consisting of all or a portion of the variant allele of the human bradykinin receptor B1 gene (e.g., wherein reference or wildtype bradykinin receptor B1 gene is exemplified by SEQ ID NO:5). Preferred portions are at least 10, preferably at least 20, preferably at least 40, preferably at least 100, contiguous polynucleotides and comprise an “A” at the nucleotide position corresponding to nucleotide 956 of the bradykinin receptor B1 gene, or a portion of SEQ ID NO:7. Alternatively, preferred portions are at least 10, preferably at least 20, preferably at least 40, preferably at least 100, contiguous polynucleotides and comprise a “G” at the nucleotide position corresponding to nucleotide 956 of the bradykinin receptor B1 gene, or a portion of SEQ ID NO:7. The invention further relates to isolated gene products, e.g., polypeptides and/or proteins, which are encoded by a nucleic acid molecule comprising all or a portion of the variant allele of the bradykinin receptor B1 gene.

[0144] In one embodiment, the invention relates to a method for predicting the likelihood that an individual will have a disorder associated with a “A” at the nucleotide position corresponding to nucleotide position 956 of SEQ ID NO:7 (or diagnosing or aiding in the diagnosis of such a disorder) comprising the steps of obtaining a DNA sample from an individual to be assessed and determining the nucleotide present at position 956 of SEQ ID NO:7. The presence of a “A” at this position indicates that the individual has a greater likelihood of having a disorder associated therewith than an individual having a “G” at that position, or a greater likelihood of having more severe symptoms.

[0145] Conversely, the invention relates to a method for predicting the likelihood that an individual will have a disorder associated with a “G” at the nucleotide position corresponding to nucleotide position 956 of SEQ ID NO:7 (or diagnosing or aiding in the diagnosis of such a disorder) comprising the steps of obtaining a DNA sample from an individual to be assessed and determining the nucleotide present at position 956 of SEQ ID NO:7. The presence of a “G” at this position indicates that the individual has a greater likelihood of having a disorder associated therewith than an individual having a “A” at that position, or a greater likelihood of having more severe symptoms.

[0146] The present invention further relates to isolated proteins or polypeptides comprising, or alternatively, consisting of all or a portion of the encoded variant amino acid sequence of the human bradykinin receptor B1 polypeptide (e.g., wherein reference or wildtype bradykinin receptor B1 polypeptide is exemplified by SEQ ID NO:6). Preferred portions are at least 10, preferably at least 20, preferably at least 40, preferably at least 100, contiguous polypeptides and comprises a “R” at the amino acid position corresponding to amino acid 317 of the bradykinin receptor B1 polypeptide, or a portion of SEQ ID NO:8. Alternatively, preferred portions are at least 10, preferably at least 20, preferably at least 40, preferably at least 100, contiguous polypeptides and comprises a “Q” at the amino acid position corresponding to amino acid 317 of the bradykinin receptor B1 protein, or a portion of SEQ ID NO:8. The invention further relates to isolated nucleic acid molecules encoding such polypeptides or proteins, as well as to antibodies that bind to such proteins or polypeptides.

[0147] Representative disorders which may be detected, diagnosed, identified, treated, prevented, and/or ameliorated by the present invention include, the following, non-limiting diseases and disorders: angioedema, cardiovascular diseases, angina pectoris, hypertension, heart failure, myocardial infarction, ventricular hypertrophy, cough associated with ACE inhibitors, cough associated with vasopeptidase inhibitors, vascular diseases, miscrovascular disease, vascular leak syndrome, aneurysm, stroke, embolism, thrombosis, endothelial dysfunction, coronary artery disease, arteriosclerosis, and/or atherosclerosis.

[0148] Additional disorders which may be detected, diagnosed, identified, treated, prevented, and/or ameliorated by the present invention include, the following, non-limiting diseases and disorders: hypotensive reactions during blood transfusions (Transfusion. 1999 Oct;39(10): 1084-8.), hypersensitivity reactions during hemodialysis (Peptides. 1999;20(4):421-30.), sepsis, inflammatory arthritis, and enterocolitis (Clin Rev Allergy Immunol. 1998 Winter;16(4):365-84.), enterocolitis (Gut. 1998 Sep;43(3):365-74.), chronic granulomatous intestinal and systemic inflammation (FASEB J. 1998 Mar;12(3):325-33.), peptidoglycan-induced arthritis (Arthritis Rheum. 1997 Jul;40(7):1327-33.), arthritis (Proc Assoc Am Physicians. 1997 Jan;109(1):10-22.), intestinal inflammation (Dig Dis Sci. 1996 May;41(5):912-20.), acute phase response of inflammation (Peptides. 1996; 17(7): 1163-70.), asthma (J Appl Physiol 1995; 78: 1844-1852), chronic obstructive pulmonary disease (COPD), cough reflex, allergies, and/or neurogenic inflammation.

[0149] In preferred embodiments, the following N-terminal BDKRB1 (SNP_ID: AE103s1) deletion polypeptides are encompassed by the present invention: M1-N353, A2-N353, S3-N353, S4-N353, W5-N353, P6-N353, P7-N353, L8-N353, E9-N353, L10-N353, Q11-N353, S12-N353, S13-N353, N14-N353, Q15-N353, S16-N353, Q17-N353, L18-N353, F19-N353, P20-N353, Q21-N353, N22-N353, A23-N353, T24-N353, A25-N353, C26-N353, D27-N353, N28-N353, A29-N353, P30-N353, E31-N353, A32-N353, W33-N353, D34-N353, L35-N353, L36-N353, H37-N353, R38-N353, V39-N353, L40-N353, P41-N353, T42-N353, F43-N353, 144-N353, 145-N353, S46-N353, 147-N353, C48-N353, F49-N353, F50-N353, G51-N353, L52-N353, L53-N353, G54-N353, N55-N353, L56-N353, F57-N353, V58-N353, L59-N353, L60-N353, V61-N353, F62-N353, L63-N353, L64-N353, P65-N353, R66-N353, R67-N353, Q68-N353, L69-N353, N70-N353, V71-N353, A72-N353, E73-N353, I74-N353, Y75-N353, L76-N353, A77-N353, N78-N353, L79-N353, A80-N353, A81-N353, S82-N353, D83-N353, L84-N353, V85-N353, F86-N353, V87-N353, L88-N353, G89-N353, L90-N353, P91-N353, F92-N353, W93-N353, A94-N353, E95-N353, N96-N353, I97-N353, W98-N353, N99-N353, Q100-N353, F101-N353, N102-N353, W103-N353, P104-N353, F105-N353, G106-N353, A107-N353, L108-N353, L109-N353, C110-N353, R111-N353, V112-N353, I113-N353, N114-N353, G115-N353, V116-N353, I117-N353, K118-N353, A119-N353, N120-N353, L121-N353, F122-N353, I123-N353, S124-N353, I125-N353, F126-N353, L127-N353, V128-N353, V129-N353, A130-N353, I131-N353, S132-N353, Q133-N353, D134-N353, R135-N353, Y136-N353, R137-N353, V138-N353, L139-N353, V140-N353, H141-N353, P142-N353, M143-N353, A144-N353, S145-N353, G146-N353, R147-N353, Q148-N353, Q149-N353, R150-N353, R151-N353, R152-N353, Q153-N353, A154-N353, R155-N353, V156-N353, T157-N353, C158-N353, V159-N353, L160-N353, I161-N353, W162-N353, V163-N353, V164-N353, G165-N353, G166-N353, L167-N353, L168-N353, S169-N353, I170-N353, P171-N353, T172-N353, F173-N353, L174-N353, L175-N353, R176-N353, S177-N353, I178-N353, Q179-N353, A180-N353, V181-N353, P182-N353, D183-N353, L184-N353, N185-N353, I186-N353, T187-N353, A188-N353, C189-N353, I190-N353, L191-N353, L192-N353, L193-N353, P194-N353, H195-N353, E196-N353, A197-N353, W198-N353, H199-N353, F200-N353, A201-N353, R202-N353, I203-N353, V204-N353, E205-N353, L206-N353, N207-N353, I208-N353, L209-N353, G210-N353, F211-N353, L212-N353, L213-N353, P214-N353, L215-N353, A216-N353, A217-N353, I218-N353, V219-N353, F220-N353, F221-N353, N222-N353, Y223-N353, H224-N353, I225-N353, L226-N353, A227-N353, S228-N353, L229-N353, R230-N353, T231-N353, R232-N353, E233-N353, E234-N353, V235-N353, S236-N353, R237-N353, T238-N353, R239-N353, V240-N353, R241-N353, G242-N353, P243-N353, K244-N353, D245-N353, S246-N353, K247-N353, T248-N353, T249-N353, A250-N353, L251-N353, I252-N353, L253-N353, T254-N353, L255-N353, V256-N353, V257-N353, A258-N353, F259-N353, L260-N353, V261-N353, C262-N353, W263-N353, A264-N353, P265-N353, Y266-N353, H267-N353, F268-N353, F269-N353, A270-N353, F271-N353, L272-N353, E273-N353, F274-N353, L275-N353, F276-N353, Q277-N353, V278-N353, Q279-N353, A280-N353, V281-N353, R282-N353, G283-N353, C284-N353, F285-N353, W286-N353, E287-N353, D288-N353, F289-N353, I290-N353, D291-N353, L292-N353, G293-N353, L294-N353, Q295-N353, L296-N353, A297-N353, N298-N353, F299-N353, F300-N353, A301-N353, F302-N353, T303-N353, N304-N353, S305-N353, S306-N353, L307-N353, N308-N353, P309-N353, V310-N353, I311-N353, Y312-N353, V313-N353, F314-N353, V315-N353, G316-N353, Q317-N353, L318-N353, F319-N353, R320-N353, T321-N353, K322-N353, V323-N353, W324-N353, E325-N353, L326-N353, Y327-N353, K328-N353, Q329-N353, C330-N353, T331-N353, P332-N353, K333-N353, S334-N353, L335-N353, A336-N353, P337-N353, I338-N353, S339-N353, S340-N353, S341-N353, H342-N353, R343-N353, K344-N353, E345-N353, I346-N353, and/or F347-N353 of SEQ ID NO:8. Polynucleotide sequences encoding these polypeptides are also provided. The present invention also encompasses the use of these N-terminal BDKRB1 (SNP_ID: AE103s1) deletion polypeptides as immunogenic and/or antigenic epitopes as described elsewhere herein.

[0150] In preferred embodiments, the following C-terminal BDKRB1 (SNP_ID: AE103s1) deletion polypeptides are encompassed by the present invention: M1-N353, M1-R352, M1-W351, M1-F350, M1-L349, M1-Q348, M1-F347, M1-I346, M1-E345, M1-K344, M1-R343, M1-H342, M1-S341, M1-S340, M1-S339, M1-I338, M1-P337, M1-A336, M1-L335, M1-S334, M1-K333, M1-P332, Ml-T331, M1-C330, M1-Q329, M1-K328, M1-Y327, M1-L326, Ml-E325, M1-W324, M1-V323, M1-K322, M1-T321, M1-R320, M1-F319, M1-L318, M1-Q317, M1-G316, M1-V315, M1-F314, M1-V313, M1-Y312, M1-I311, M1-V310, M1-P309, M1-N308, M1-L307, M1-S306, M1-S305, M1-N304, M1-T303, M1-F302, M1-A301, M1-F300, M1-F299,

[0151] M1-N298, M1-A297, M1-L296, M1-Q295, M1-L294, M1-G293, M1-L292, M1-D291, M1-I290, M1-F289, M1-D288, M1-E287, M1-W286, M1-F285, M1-C284,

[0152] M1-G283, M1-R282, M1-V281, M1-A280, M1-Q279, M1-V278, M1-Q277, M1-F276, M1-L275, M1-F274, M1-E273, M1-L272, M1-F271, M1-A270, M1-F269, M1-F268, M1-H267, M1-Y266, M1-P265, M1-A264, M1-W263, M1-C262, M1-V261, M1-L260, M1-F259, M1-A258, M1-V257, M1-V256, M1-L255, M1-T254, M1-L253, M1-1252, M1-L251, M1-A250, M1-T249, M1-T248, M1-K247, M1-S246, M1-D245, M1-K244, M1-P243, M1-G242, M1-R241, M1-V240, M1-R239, M1-T238, M1-R237, M1-S236, M1-V235, M1-E234, M1-E233, M1-R232, M1-T231, M1-R230, M1-L229, M1-S228, M1-A227, M1-L226, M1-I225, M1-H224, M1-Y223, M1-N222, M1-F221, M1-F220, M1-V219, M1-I218, M1-A217, M1-A216, M1-L215, M1-P214, M1-L213, M1-L212, M1-F211, M1-G210, M1-L209, M1-1208, M1-N207, M1-L206, M1-E205, M1-V204, M1-1203, M1-R202, M1-A201, M1-F200, M1-H199, M1-W198, M1-A197, M1-E196, M1-H195, M1-P194, M1-L193, M1-L192, M1-L191, M1-I190, M1-C189, M1-A188, M1-T187, M1-I186, M1-N185, M1-L184, M1-D183, M1-P182, M1-V181, M1-A180, M1-Q179, M1-I178, M1-S177, M1-R176, M1-L175, M1-L174, M1-F173, M1-T172, M1-P171, M1-I170, M1-S169, M1-L168, M1-L167, M1-G166, M1-G165, M1-V164, M1-V163, M1-W162, M1-1161, M1-L160, M1-V159, M1-C158, M1-T157, M1-V156, M1-R155, M1-A154, M1-Q153, M1-R152, M1-R151, M1-R150, M1-Q149, M1-Q148, M1-R147, M1-G146, M1-S145, M1-A144, M1-M143, M1-P142, M1-H141, M1-V140, M1-L139, M1-V138, M1-R137, M1-Y136, M1-R135, M1-D134, M1-Q133, M1-S132, M1-I131, M1-A130, M1-V129, M1-V128, M1-L127, M1-F126, M1-I125, M1-S124, M1-I123, M1-F122, M1-L121, M1-N120, M1-A119, M1-K118, M1-I117, M1-V116, M1-G115, M1-N114, M1-I113, M1-VI12, M1-R111, M1-C110, M1-L109, M1-L108, M1-A107, M1-G106, M1-F105, M1-P104, M1-W103, M1-N102, M1-F110, M1-Q100, M1-N99, M1-W98, M1-197, M1-N96, M1-E95, M1-A94, M1-W93, M1-F92, M1-P91, M1-L90, M1-G89, M1-L88, M1-V87, M1-F86, M1-V85, M1-L84, M1-D83, M1-S82, M1-A81, M1-A80, M1-L79, M1-N78, M1-A77, M1-L76, M1-Y75, M1-174, M1-E73, M1-A72, M1-V71, M1-N70, M1-L69, M1-Q68, M1-R67, M1-R66, M1-P65, M1-L64, M1-L63, M1-F62, M1-V61, M1-L60, M1-L59, M1-V58, M1-F57, M1-L56, M1-N55, M1-G54, M1-L53, M1-L52, M1-G51, M1-F50, M1-F49, M1-C48, M1-I47, M1-S46, M1-145, M1-I44, M1-F43, M1-T42, M1-P41, M1-L40, M1-V39, M1-R38, M1-H37, M1-L36, M1-L35, M1-D34, M1-W33, M1-A32, M1-E31, M1-P30, M1-A29, M1-N28, M1-D27, M1-C26, M1-A25, M1-T24, M1-A23, M1-N22, M1-Q21, M1-P20, M1-F19, M1-L18, M1-Q17, M1-S16, M1-Q15, M1-N14, M1-S13, M1-S12, M1-Q11, M1-L10, M1-E9, M1-L8, and/or M1-P7 of SEQ ID NO:8. Polynucleotide sequences encoding these polypeptides are also provided. The present invention also encompasses the use of these C-terminal BDKRB1 (SNP_ID: AE103s1) deletion polypeptides as immunogenic and/or antigenic epitopes as described elsewhere herein.

[0153] Alternatively, preferred polypeptides of the present invention may comprise polypeptide sequences corresponding to, for example, internal regions of the BDKRB1 (SNP_ID: AE103s1) polypeptide (e.g., any combination of both N- and C-terminal BDKRB1 (SNP_ID: AE103s1) polypeptide deletions) of SEQ ID NO:8. For example, internal regions could be defined by the equation: amino acid NX to amino acid CX, wherein NX refers to any N-terminal deletion polypeptide amino acid of BDKRBl (SNP_ID: AE103s1) (SEQ ID NO:8), and where CX refers to any C-terminal deletion polypeptide amino acid of BDKRB1 (SNP_ID: AE103s1) (SEQ ID NO:8). Polynucleotides encoding these polypeptides are also provided. The present invention also encompasses the use of these polypeptides as an immunogenic and/or antigenic epitope as described elsewhere herein. Preferably, the resulting deletion polypeptide comprises the polypeptide polymorphic loci identified elsewhere herein for BDKRB1 (SNP_ID: AE103s1), and more preferably comprises the polypeptide polymorphic allele identified elsewhere herein for BDKRB1 (SNP_ID: AE103s1).

[0154] Features of the Polypeptide Encoded by Gene No:3

[0155] The present invention relates to isolated nucleic acid molecules comprising, or alternatively, consisting of all or a portion of the variant allele of the human bradykinin receptor B I gene (e.g., wherein reference or wildtype bradykinin receptor B1 gene is exemplified by SEQ ID NO:5). Preferred portions are at least 10, preferably at least 20, preferably at least 40, preferably at least 100, contiguous polynucleotides and comprise an “A” at the nucleotide position corresponding to nucleotide 129 of the bradykinin receptor B1 gene, or a portion of SEQ ID NO:9. Alternatively, preferred portions are at least 10, preferably at least 20, preferably at least 40, preferably at least 100, contiguous polynucleotides and comprise a “G” at the nucleotide position corresponding to nucleotide 129 of the bradykinin receptor B1 gene, or a portion of SEQ ID NO:9. The invention further relates to isolated gene products, e.g., polypeptides and/or proteins, which are encoded by a nucleic acid molecule comprising all or a portion of the variant allele of the bradykinin receptor B1 gene.

[0156] In one embodiment, the invention relates to a method for predicting the likelihood that an individual will have a disorder associated with a “A” at the nucleotide position corresponding to nucleotide position 129 of SEQ ID NO:9 (or diagnosing or aiding in the diagnosis of such a disorder) comprising the steps of obtaining a DNA sample from an individual to be assessed and determining the nucleotide present at position 129 of SEQ ID NO:9. The presence of a “A” at this position indicates that the individual has a greater likelihood of having a disorder associated therewith than an individual having a “G” at that position, or a greater likelihood of having more severe symptoms.

[0157] Conversely, the invention relates to a method for predicting the likelihood that an individual will have a disorder associated with a “G” at the nucleotide position corresponding to nucleotide position 129 of SEQ ID NO:9 (or diagnosing or aiding in the diagnosis of such a disorder) comprising the steps of obtaining a DNA sample from an individual to be assessed and determining the nucleotide present at position 129 of SEQ ID NO:9. The presence of a “G” at this position indicates that the individual has a greater likelihood of having a disorder associated therewith than an individual having a “A” at that position, or a greater likelihood of having more severe symptoms.

[0158] Representative disorders which may be detected, diagnosed, identified, treated, prevented, and/or ameliorated by the present invention include, the following, non-limiting diseases and disorders: angioedema, cardiovascular diseases, angina pectoris, hypertension, heart failure, myocardial infarction, ventricular hypertrophy, cough associated with ACE inhibitors, cough associated with vasopeptidase inhibitors, vascular diseases, miscrovascular disease, vascular leak syndrome, aneurysm, stroke, embolism, thrombosis, endothelial dysfunction, coronary artery disease, arteriosclerosis, and/or atherosclerosis.

[0159] Additional disorders which may be detected, diagnosed, identified, treated, prevented, and/or ameliorated by the present invention include, the following, non-limiting diseases and disorders: hypotensive reactions during blood transfusions (Transfusion. 1999 Oct;39(10):1084-8.), hypersensitivity reactions during hemodialysis (Peptides. 1999;20(4):421-30.), sepsis, inflammatory arthritis, and enterocolitis (Clin Rev Allergy Immunol. 1998 Winter; 16(4):365-84.), enterocolitis (Gut. 1998 Sep;43(3):365-74.), chronic granulomatous intestinal and systemic inflammation (FASEB J. 1998 Mar;12(3):325-33.), peptidoglycan-induced arthritis (Arthritis Rheum. 1997 Jul;40(7):1327-33.), arthritis (Proc Assoc Am Physicians. 1997 Jan;109(1):10-22.), intestinal inflammation (Dig Dis Sci. 1996 May;41(5):912-20.), acute phase response of inflammation (Peptides. 1996; 17(7):1163-70.), asthma (J Appl Physiol 1995; 78: 1844-1852), chronic obstructive pulmonary disease (COPD), cough reflex, allergies, and/or neurogenic inflammation.

[0160] Features of the Polypeptide Encoded by Gene No:4

[0161] The present invention relates to isolated nucleic acid molecules comprising, or alternatively, consisting of all or a portion of the variant allele of the human tachykinin receptor 1 gene (e.g., wherein reference or wildtype tachykinin receptor 1 gene is exemplified by SEQ ID NO: 1). Preferred portions are at least 10, preferably at least 20, preferably at least 40, preferably at least 100, contiguous polynucleotides and comprise a “G” at the nucleotide position corresponding to nucleotide 543 of the tachykinin receptor 1 gene, or a portion of SEQ ID NO: 15. Alternatively, preferred portions are at least 10, preferably at least 20, preferably at least 40, preferably at least 100, contiguous polynucleotides and comprise an “A” at the nucleotide position corresponding to nucleotide 543 of the tachykinin receptor 1 gene, or a portion of SEQ_ID NO: 15. The invention further relates to isolated gene products, e.g., polypeptides and/or proteins, which are encoded by a nucleic acid molecule comprising all or a portion of the variant allele of the tachykinin receptor 1 gene.

[0162] In one embodiment, the invention relates to a method for predicting the likelihood that an individual will have a disorder associated with a “G” at the nucleotide position corresponding to nucleotide position 543 of SEQ ID NO:15 (or diagnosing or aiding in the diagnosis of such a disorder) comprising the steps of obtaining a DNA sample from an individual to be assessed and determining the nucleotide present at position 543 of SEQ ID NO: 15. The presence of a “G” at this position indicates that the individual has a greater likelihood of having a disorder associated therewith than an individual having a “A” at that position, or a greater likelihood of having more severe symptoms.

[0163] Conversely, the invention relates to a method for predicting the likelihood that an individual will have a disorder associated with a “A” at the nucleotide position corresponding to nucleotide position 543 of SEQ ID NO: 15 (or diagnosing or aiding in the diagnosis of such a disorder) comprising the steps of obtaining a DNA sample from an individual to be assessed and determining the nucleotide present at position 543 of SEQ ID NO:15. The presence of a “G” at this position indicates that the individual has a greater likelihood of having a disorder associated therewith than an individual having a “A” at that position, or a greater likelihood of having more severe symptoms.

[0164] Representative disorders which may be detected, diagnosed, identified, treated, prevented, and/or ameliorated by the present invention include, the following, non-limiting diseases and disorders: angioedema, cardiovascular diseases, angina pectoris, hypertension, heart failure, myocardial infarction, ventricular hypertrophy, cough associated with ACE inhibitors, cough associated with vasopeptidase inhibitors, vascular diseases, miscrovascular disease, vascular leak syndrome, aneurysm, stroke, embolism, thrombosis, endothelial dysfunction, coronary artery disease, arteriosclerosis, and/or atherosclerosis.

[0165] Additional disorders which may be detected, diagnosed, identified, treated, prevented, and/or ameliorated by the present invention include, the following, non-limiting diseases and disorders: hypotensive reactions during blood transfusions (Transfusion. 1999 Oct;39(10):1084-8.), hypersensitivity reactions during hemodialysis (Peptides. 1999;20(4):421-30.), sepsis, inflammatory arthritis, and enterocolitis (Clin Rev Allergy Immunol. 1998 Winter;16(4):365-84.), enterocolitis (Gut. 1998 Sep;43(3):365-74.), chronic granulomatous intestinal and systemic inflammation (FASEB J. 1998 Mar;12(3):325-33.), peptidoglycan-induced arthritis (Arthritis Rheum. 1997 Jul;40(7):1327-33.), arthritis (Proc Assoc Am Physicians. 1997 Jan;109(l):10-22.), intestinal inflammation (Dig Dis Sci. 1996 May;41(5):912-20.), acute phase response of inflammation (Peptides. 1996;17(7): 1163-70.), asthma (J Appl Physiol 1995; 78: 1844-1852), chronic obstructive pulmonary disease (COPD), cough reflex, allergies, and/or neurogenic inflammation.

[0166] Features of the Polypeptide Encoded by Gene No:5

[0167] The present invention relates to isolated nucleic acid molecules comprising, or alternatively, consisting of all or a portion of the variant allele of the human tachykinin receptor 1 gene (e.g., wherein reference or wildtype tachykinin receptor 1 gene is exemplified by SEQ ID NO: 13). Preferred portions are at least 10, preferably at least 20, preferably at least 40, preferably at least 100, contiguous polynucleotides and comprise a “T” at the nucleotide position corresponding to nucleotide 672 of the tachykinin receptor 1 gene, or a portion of SEQ ID NO: 17. Alternatively, preferred portions are at least 10, preferably at least 20, preferably at least 40, preferably at least 100, contiguous polynucleotides and comprise a “G” at the nucleotide position corresponding to nucleotide 672 of the tachykinin receptor 1 gene, or a portion of SEQ ID NO: 17. The invention further relates to isolated gene products, e.g., polypeptides and/or proteins, which are encoded by a nucleic acid molecule comprising all or a portion of the variant allele of the tachykinin receptor 1 gene.

[0168] In one embodiment, the invention relates to a method for predicting the likelihood that an individual will have a disorder associated with a “T” at the nucleotide position corresponding to nucleotide position 672 of SEQ ID NO: 17 (or diagnosing or aiding in the diagnosis of such a disorder) comprising the steps of obtaining a DNA sample from an individual to be assessed and determining the nucleotide present at position 672 of SEQ ID NO: 17. The presence of a “T” at this position indicates that the individual has a greater likelihood of having a disorder associated therewith than an individual having a “G” at that position, or a greater likelihood of having more severe symptoms.

[0169] Conversely, the invention relates to a method for predicting the likelihood that an individual will have a disorder associated with a “G” at the nucleotide position corresponding to nucleotide position 672 of SEQ ID NO: 17 (or diagnosing or aiding in the diagnosis of such a disorder) comprising the steps of obtaining a DNA sample from an individual to be assessed and determining the nucleotide present at position 672 of SEQ ID NO: 17. The presence of a “G” at this position indicates that the individual has a greater likelihood of having a disorder associated therewith than an individual having a “T” at that position, or a greater likelihood of having more severe symptoms.

[0170] Representative disorders which may be detected, diagnosed, identified, treated, prevented, and/or ameliorated by the present invention include, the following, non-limiting diseases and disorders: angioedema, cardiovascular diseases, angina pectoris, hypertension, heart failure, myocardial infarction, ventricular hypertrophy, cough associated with ACE inhibitors, cough associated with vasopeptidase inhibitors, vascular diseases, miscrovascular disease, vascular leak syndrome, aneurysm, stroke, embolism, thrombosis, endothelial dysfunction, coronary artery disease, arteriosclerosis, and/or atherosclerosis.

[0171] Additional disorders which may be detected, diagnosed, identified, treated, prevented, and/or ameliorated by the present invention include, the following, non-limiting diseases and disorders: hypotensive reactions during blood transfusions (Transfusion. 1999 Oct;39(10):1084-8.), hypersensitivity reactions during hemodialysis (Peptides. 1999;20(4):421-30.), sepsis, inflammatory arthritis, and enterocolitis (Clin Rev Allergy Immunol. 1998 Winter;16(4):365-84.), enterocolitis (Gut. 1998 Sep;43(3):365-74.), chronic granulomatous intestinal and systemic inflammation (FASEB J. 1998 Mar;12(3):325-33.), peptidoglycan-induced arthritis (Arthritis Rheum. 1997 Jul;40(7):1327-33.), arthritis (Proc Assoc Am Physicians. 1997 Jan;109(1):10-22.), intestinal inflammation (Dig Dis Sci. 1996 May;41(5):912-20.), acute phase response of inflammation (Peptides. 1996;17(7): 1163-70.), asthma (J Appl Physiol 1995; 78: 1844-1852), chronic obstructive pulmonary disease (COPD), cough reflex, allergies, and/or neurogenic inflammation.

[0172] Features of the Polypeptide Encoded by Gene No:6

[0173] The present invention relates to isolated nucleic acid molecules comprising, or alternatively, consisting of all or a portion of the variant allele of the human tachykinin receptor 1 gene (e.g., wherein reference or wildtype tachykinin receptor 1 gene is exemplified by SEQ ID NO: 13). Preferred portions are at least 10, preferably at least 20, preferably at least 40, preferably at least 100, contiguous polynucleotides and comprise a “T” at the nucleotide position corresponding to nucleotide 1344 of the tachykinin receptor 1 gene, or a portion of SEQ ID NO:19. Alternatively, preferred portions are at least 10, preferably at least 20, preferably at least 40, preferably at least 100, contiguous polynucleotides and comprise a “C” at the nucleotide position corresponding to nucleotide 1344 of the tachykinin receptor 1 gene, or a portion of SEQ ID NO: 19. The invention further relates to isolated gene products, e.g., polypeptides and/or proteins, which are encoded by a nucleic acid molecule comprising all or a portion of the variant allele of the tachykinin receptor 1 gene.

[0174] In one embodiment, the invention relates to a method for predicting the likelihood that an individual will have a disorder associated with a “T” at the nucleotide position corresponding to nucleotide position 1344 of SEQ ID NO:19 (or diagnosing or aiding in the diagnosis of such a disorder) comprising the steps of obtaining a DNA sample from an individual to be assessed and determining the nucleotide present at position 1344 of SEQ ID NO: 19. The presence of a “T” at this position indicates that the individual has a greater likelihood of having a disorder associated therewith than an individual having a “C” at that position, or a greater likelihood of having more severe symptoms.

[0175] Conversely, the invention relates to a method for predicting the likelihood that an individual will have a disorder associated with a “C” at the nucleotide position corresponding to nucleotide position 1344 of SEQ ID NO: 19 (or diagnosing or aiding in the diagnosis of such a disorder) comprising the steps of obtaining a DNA sample from an individual to be assessed and determining the nucleotide present at position 1344 of SEQ ID NO:19. The presence of a “C” at this position indicates that the individual has a greater likelihood of having a disorder associated therewith than an individual having a “T” at that position, or a greater likelihood of having more severe symptoms.

[0176] Representative disorders which may be detected, diagnosed, identified, treated, prevented, and/or ameliorated by the present invention include, the following, non-limiting diseases and disorders: angioedema, cardiovascular diseases, angina pectoris, hypertension, heart failure, myocardial infarction, ventricular hypertrophy, cough associated with ACE inhibitors, cough associated with vasopeptidase inhibitors, vascular diseases, miscrovascular disease, vascular leak syndrome, aneurysm, stroke, embolism, thrombosis, endothelial dysfunction, coronary artery disease, arteriosclerosis, and/or atherosclerosis.

[0177] Additional disorders which may be detected, diagnosed, identified, treated, prevented, and/or ameliorated by the present invention include, the following, non-limiting diseases and disorders: hypotensive reactions during blood transfusions (Transfusion. 1999 Oct;39(10):1084-8.), hypersensitivity reactions during hemodialysis (Peptides. 1999;20(4):421-30.), sepsis, inflammatory arthritis, and enterocolitis (Clin Rev Allergy Immunol. 1998 Winter;16(4):365-84.), enterocolitis (Gut. 1998 Sep;43(3):365-74.), chronic granulomatous intestinal and systemic inflammation (FASEB J. 1998 Mar;12(3):325-33.), peptidoglycan-induced arthritis (Arthritis Rheum. 1997 Jul;40(7):1327-33.), arthritis (Proc Assoc Am Physicians. 1997 Jan;109(1):10-22.), intestinal inflammation (Dig Dis Sci. 1996 May;41(5):912-20.), acute phase response of inflammation (Peptides. 1996; 17(7): 1163-70.), asthma (J Appl Physiol 1995; 78: 1844-1852), chronic obstructive pulmonary disease (COPD), cough reflex, allergies, and/or neurogenic inflammation.

[0178] Features of the Polypeptide Encoded by Gene No:7

[0179] The present invention relates to isolated nucleic acid molecules comprising, or alternatively, consisting of all or a portion of the variant allele of the human Cl esterase inhibitor gene (e.g., wherein reference or wildtype C1 esterase inhibitor gene is exemplified by SEQ ID NO:21). Preferred portions are at least 10, preferably at least 20, preferably at least 40, preferably at least 100, contiguous polynucleotides and comprise a “T” at the nucleotide position corresponding to nucleotide 1278 of the C1 esterase inhibitor gene, or a portion of SEQ ID NO:23. Alternatively, preferred portions are at least 10, preferably at least 20, preferably at least 40, preferably at least 100, contiguous polynucleotides and comprise a “C” at the nucleotide position corresponding to nucleotide 1278 of the C1 esterase inhibitor gene, or a portion of SEQ ID NO:23. The invention further relates to isolated gene products, e.g., polypeptides and/or proteins, which are encoded by a nucleic acid molecule comprising all or a portion of the variant allele of the C1 esterase inhibitor gene.

[0180] In one embodiment, the invention relates to a method for predicting the likelihood that an individual will have a disorder associated with a “T” at the nucleotide position corresponding to nucleotide position 1278 of SEQ ID NO:23 (or diagnosing or aiding in the diagnosis of such a disorder) comprising the steps of obtaining a DNA sample from an individual to be assessed and determining the nucleotide present at position 1278 of SEQ ID NO:23. The presence of a “T” at this position indicates that the individual has a greater likelihood of having a disorder associated therewith than an individual having a “C” at that position, or a greater likelihood of having more severe symptoms.

[0181] Conversely, the invention relates to a method for predicting the likelihood that an individual will have a disorder associated with a “C” at the nucleotide position corresponding to nucleotide position 1278 of SEQ ID NO:23 (or diagnosing or aiding in the diagnosis of such a disorder) comprising the steps of obtaining a DNA sample from an individual to be assessed and determining the nucleotide present at position 1278 of SEQ ID NO:23. The presence of a “C” at this position indicates that the individual has a greater likelihood of having a disorder associated therewith than an individual having a “T” at that position, or a greater likelihood of having more severe symptoms.

[0182] Representative disorders which may be detected, diagnosed, identified, treated, prevented, and/or ameliorated by the present invention include, the following, non-limiting diseases and disorders: angioedema, cardiovascular diseases, angina pectoris, hypertension, heart failure, myocardial infarction, ventricular hypertrophy, cough associated with ACE inhibitors, cough associated with vasopeptidase inhibitors, vascular diseases, miscrovascular disease, vascular leak syndrome, aneurysm, stroke, embolism, thrombosis, endothelial dysfunction, coronary artery disease, arteriosclerosis, and/or atherosclerosis.

[0183] Additional disorders which may be detected, diagnosed, identified, treated, prevented, and/or ameliorated by the present invention include, the following, non-limiting diseases and disorders: hypotensive reactions during blood transfusions (Transfusion. 1999 Oct;39(10):1084-8.), hypersensitivity reactions during hemodialysis (Peptides. 1999;20(4):421-30.), sepsis, inflammatory arthritis, and enterocolitis (Clin Rev Allergy Immunol. 1998 Winter;16(4):365-84.), enterocolitis (Gut. 1998 Sep;43(3):365-74.), chronic granulomatous intestinal and systemic inflammation (FASEB J. 1998 Mar;12(3):325-33.), peptidoglycan-induced arthritis (Arthritis Rheum. 1997 Jul;40(7):1327-33.), arthritis (Proc Assoc Am Physicians. 1997 Jan;109(1):10-22.), intestinal inflammation (Dig Dis Sci. 1996 May;41(5):912-20.), acute phase response of inflammation (Peptides. 1996; 17(7): 1163-70.), asthma (J Appl Physiol 1995; 78: 1844-1852), chronic obstructive pulmonary disease (COPD), cough reflex, allergies, and/or neurogenic inflammation.

[0184] Features of the Polypeptide Encoded by Gene No:8

[0185] The present invention relates to isolated nucleic acid molecules comprising, or alternatively, consisting of all or a portion of the variant allele of the human C1 esterase inhibitor gene (e.g., wherein reference or wildtype C1 esterase inhibitor gene is exemplified by SEQ ID NO:21). Preferred portions are at least 10, preferably at least 20, preferably at least 40, preferably at least 100, contiguous polynucleotides and comprise a “C” at the nucleotide position corresponding to nucleotide 227 of the C1 esterase inhibitor gene, or a portion of SEQ ID NO:25. Alternatively, preferred portions are at least 10, preferably at least 20, preferably at least 40, preferably at least 100, contiguous polynucleotides and comprise a “T” at the nucleotide position corresponding to nucleotide 227 of the C I esterase inhibitor gene, or a portion of SEQ ID NO:25. The invention further relates to isolated gene products, e.g., polypeptides and/or proteins, which are encoded by a nucleic acid molecule comprising all or a portion of the variant allele of the C I esterase inhibitor gene.

[0186] In one embodiment, the invention relates to a method for predicting the likelihood that an individual will have a disorder associated with a “C” at the nucleotide position corresponding to nucleotide position 227 of SEQ ID NO:25 (or diagnosing or aiding in the diagnosis of such a disorder) comprising the steps of obtaining a DNA sample from an individual to be assessed and determining the nucleotide present at position 227 of SEQ ID NO:25. The presence of a “C” at this position indicates that the individual has a greater likelihood of having a disorder associated therewith than an individual having a “T” at that position, or a greater likelihood of having more severe symptoms.

[0187] Conversely, the invention relates to a method for predicting the likelihood that an individual will have a disorder associated with a “T” at the nucleotide position corresponding to nucleotide position 227 of SEQ ID NO:25 (or diagnosing or aiding in the diagnosis of such a disorder) comprising the steps of obtaining a DNA sample from an individual to be assessed and determining the nucleotide present at position 227 of SEQ ID NO:25. The presence of a “T” at this position indicates that the individual has a greater likelihood of having a disorder associated therewith than an individual having a “C” at that position, or a greater likelihood of having more severe symptoms.

[0188] The present invention further relates to isolated proteins or polypeptides comprising, or alternatively, consisting of all or a portion of the encoded variant amino acid sequence of the human C1 esterase inhibitor polypeptide (e.g., wherein reference or wildtype human C1 esterase inhibitor polypeptide is exemplified by SEQ ID NO:22). Preferred portions are at least 10, preferably at least 20, preferably at least 40, preferably at least 100, contiguous polypeptides and comprises a “A” at the amino acid position corresponding to amino acid 56 of the human C1 esterase inhibitor polypeptide, or a portion of SEQ ID NO:26. Alternatively, preferred portions are at least 10, preferably at least 20, preferably at least 40, preferably at least 100, contiguous polypeptides and comprises a “V” at the amino acid position corresponding to amino acid 56 of the human C1 esterase inhibitor protein, or a portion of SEQ ID NO:26. The invention further relates to isolated nucleic acid molecules encoding such polypeptides or proteins, as well as to antibodies that bind to such proteins or polypeptides.

[0189] Representative disorders which may be detected, diagnosed, identified, treated, prevented, and/or ameliorated by the present invention include, the following, non-limiting diseases and disorders: angioedema, cardiovascular diseases, angina pectoris, hypertension, heart failure, myocardial infarction, ventricular hypertrophy, cough associated with ACE inhibitors, cough associated with vasopeptidase inhibitors, vascular diseases, miscrovascular disease, vascular leak syndrome, aneurysm, stroke, embolism, thrombosis, endothelial dysfunction, coronary artery disease, arteriosclerosis, and/or atherosclerosis.

[0190] Additional disorders which may be detected, diagnosed, identified, treated, prevented, and/or ameliorated by the present invention include, the following, non-limiting diseases and disorders: hypotensive reactions during blood transfusions (Transfusion. 1999 Oct;39(10):1084-8.), hypersensitivity reactions during hemodialysis (Peptides. 1999;20(4):421-30.), sepsis, inflammatory arthritis, and enterocolitis (Clin Rev Allergy Immunol. 1998 Winter;16(4):365-84.), enterocolitis (Gut. 1998 Sep;43(3):365-74.), chronic granulomatous intestinal and systemic inflammation (FASEB J. 1998 Mar;12(3):325-33.), peptidoglycan-induced arthritis (Arthritis Rheum. 1997 Jul;40(7):1327-33.), arthritis (Proc Assoc Am Physicians. 1997 Jan;109(1):10-22.), intestinal inflammation (Dig Dis Sci. 1996 May;41(5):912-20.), acute phase response of inflammation (Peptides. 1996; 17(7): 1163-70.), asthma (J Appl Physiol 1995; 78: 1844-1852), chronic obstructive pulmonary disease (COPD), cough reflex, allergies, and/or neurogenic inflammation.

[0191] In preferred embodiments, the following N-terminal C1NH (SNP_ID: AE105s4) deletion polypeptides are encompassed by the present invention: M1-A500, A2-A500, S3-A500, R4-A500, L5-A500, T6-A500, L7-A500, L8-A500, T9-A500, L10-A500, L11-A500, L12-A500, L13-A500, L14-A500, L15-A500, A16-A500, G17-A500, D18-A500, R19-A500, A20-A500, S21-A500, S22-A500, N23-A500, P24-A500, N25-A500, A26-A500, T27-A500, S28-A500, S29-A500, S30-A500, S31-A500, Q32-A500, D33-A500, P34-A500, E35-A500, S36-A500, L37-A500, Q38-A500, D39-A500, R40-A500, G41-A500, E42-A500, G43-A500, K44-A500, V45-A500, A46-A500, T47-A500, T48-A500, V49-A500, I50-A500, S51-A500, K52-A500, M53-A500, L54-A500, F55-A500, A56-A500, E57-A500, P58-A500, 159-A500, L60-A500, E61-A500, V62-A500, S63-A500, S64-A500, L65-A500, P66-A500, T67-A500, T68-A500, N69-A500, S70-A500, T71-A500, T72-A500, N73-A500, S74-A500, A75-A500, T76-A500, K77-A500, I78-A500, T79-A500, A80-A500, N81-A500, T82-A500, T83-A500, D84-A500, E85-A500, P86-A500, T87-A500, T88-A500, Q89-A500, P90-A500, T91-A500, T92-A500, E93-A500, P94-A500, T95-A500, T96-A500, Q97-A500, P98-A500, T99-A500, I100-A500, Q101-A500, P102-A500, T103-A500, Q104-A500, P105-A500, T106-A500, T107-A500, Q108-A500, L109-A500, P110-A500, T111-A500, D112-A500, S113-A500, P114-A500, T115-A500, Q116-A500, P117-A500, T118-A500, T119-A500, G120-A500, S121-A500, F122-A500, C123-A500, P124-A500, G125-A500, P126-A500, V127-A500, T128-A500, L129-A500, C130-A500, S131-A500, D132-A500, L133-A500, E134-A500, S135-A500, H136-A500, S137-A500, T138-A500, E139-A500, A140-A500, V141-A500, L142-A500, G143-A500, D144-A500, A145-A500, L146-A500, V147-A500, D148-A500, F149-A500, S150-A500, L151-A500, K152-A500, L153-A500, Y154-A500, H155-A500, A156-A500, F157-A500, S158-A500, A159-A500, M160-A500, K161-A500, K162-A500, V163-A500, E164-A500, T165-A500, N166-A500, M167-A500, A168-A500, F169-A500, S170-A500, P171-A500, F172-A500, S173-A500, I174-A500, A175-A500, S176-A500, L177-A500, L178-A500, T179-A500, Q180-A500, V181-A500, L182-A500, L183-A500, G184-A500, A185-A500, G186-A500, Q187-A500, N188-A500, T189-A500, K190-A500, Ti91-A500, N192-A500, L193-A500, E194-A500, S195-A500, I196-A500, L197-A500, S198-A500, Y199-A500, P200-A500, K201-A500, D202-A500, F203-A500, T204-A500, C205-A500, V206-A500, H207-A500, Q208-A500, A209-A500, L210-A500, K211-A500, G212-A500, F213-A500, T214-A500, T215-A500, K216-A500, G217-A500, V218-A500, T219-A500, S220-A500, V221-A500, S222-A500, Q223-A500, I224-A500, F225-A500, H226-A500, S227-A500, P228-A500, D229-A500, L230-A500, A231-A500, I232-A500, R233-A500, D234-A500, T235-A500, F236-A500, V237-A500, N238-A500, A239-A500, S240-A500, R241-A500, T242-A500, L243-A500, Y244-A500, S245-A500, S246-A500, S247-A500, P248-A500, R249-A500, V250-A500, L251-A500, S252-A500, N253-A500, N254-A500, S255-A500, D256-A500, A257-A500, N258-A500, L259-A500, E260-A500, L261-A500, I262-A500, N263-A500, T264-A500, W265-A500, V266-A500, A267-A500, K268-A500, N269-A500, T270-A500, N271-A500, N272-A500, K273-A500, I274-A500, S275-A500, R276-A500, L277-A500, L278-A500, D279-A500, S280-A500, L281-A500, P282-A500, S283-A500, D284-A500, T285-A500, R286-A500, L287-A500, V288-A500, L289-A500, L290-A500, N291-A500, A292-A500, I293-A500, Y294-A500, L295-A500, S296-A500, A297-A500, K298-A500, W299-A500, K300-A500, T301-A500, T302-A500, F303-A500, D304-A500, P305-A500, K306-A500, K307-A500, T308-A500, R309-A500, M310-A500, E311-A500, P312-A500, F313-A500, H314-A500, F315-A500, K316-A500, N317-A500, S318-A500, V319-A500, I320-A500, K321-A500, V322-A500, P323-A500, M324-A500, M325-A500, N326-A500, S327-A500, K328-A500, K329-A500, Y330-A500, P331-A500, V332-A500, A333-A500, H334-A500, F335-A500, I336-A500, D337-A500, Q338-A500, T339-A500, L340-A500, K341-A500, A342-A500, K343-A500, V344-A500, G345-A500, Q346-A500, L347-A500, Q348-A500, L349-A500, S350-A500, H351-A500, N352-A500, L353-A500, S354-A500, L355-A500, V356-A500, I357-A500, L358-A500, V359-A500, P360-A500, Q361-A500, N362-A500, L363-A500, K364-A500, H365-A500, R366-A500, L367-A500, E368-A500, D369-A500, M370-A500, E371-A500, Q372-A500, A373-A500, L374-A500, S375-A500, P376-A500, S377-A500, V378-A500, F379-A500, K380-A500, A381-A500, I382-A500, M383-A500, E384-A500, K385-A500, L386-A500, E387-A500, M388-A500, S389-A500, K390-A500, F391-A500, Q392-A500, P393-A500, T394-A500, L395-A500, L396-A500, T397-A500, L398-A500, P399-A500, R400-A500, I401-A500, K402-A500, V403-A500, T404-A500, T405-A500, S406-A500, Q407-A500, D408-A500, M409-A500, L410-A500, S411-A500, I412-A500, M413-A500, E414-A500, K415-A500, L416-A500, E417-A500, F418-A500, F419-A500, D420-A500, F421-A500, S422-A500, Y423-A500, D424-A500, LA25-A500, N426-A500, L427-A500, C428-A500, G429-A500, L430-A500, T431-A500, E432-A500, D433-A500, P434-A500, D435-A500, L436-A500, Q437-A500, V438-A500, S439-A500, A440-A500, M441-A500, Q442-A500, H443-A500, Q444-A500, T445-A500, V446-A500, L447-A500, E448-A500, L449-A500, T450-A500, E451-A500, T452-A500, G453-A500, V454-A500, E455-A500, A456-A500, A457-A500, A458-A500, A459-A500, S460-A500, A461-A500, I462-A500, S463-A500, V464-A500, A465-A500, R466-A500, T467-A500, L468-A500, L469-A500, V470-A500, F471-A500, E472-A500, V473-A500, Q474-A500, Q475-A500, P476-A500, F477-A500, L478-A500, F479-A500, V480-A500, L481-A500, W482-A500, D483-A500, Q484-A500, Q485-A500, H486-A500, K487-A500, F488-A500, P489-A500, V490-A500, F491-A500, M492-A500, G493-A500, and/or R494-A500 of SEQ ID NO:26. Polynucleotide sequences encoding these polypeptides are also provided. The present invention also encompasses the use of these N-terminal C1NH (SNP_ID: AE105s4) deletion polypeptides as immunogenic and/or antigenic epitopes as described elsewhere herein.

[0192] In preferred embodiments, the following C-terminal C1NH (SNP_ID: AE105s4) deletion polypeptides are encompassed by the present invention: M1-A500, M1-R499, M1-P498, M1-D497, M1-Y496, M1-V495, M1-R494, M1-G493, M1-M492, M1-F491, M1-V490, M1-P489, M1-F488, M1-K487, M1-H486, M1-Q485, M1-Q484, M1-D483, M1-W482, M1-L481, M1-V480, M1-F479, M1-L478, M1-F477, M1-P476, M1-Q475, M1-Q474, M1-V473, M1-E472, M1-F471, M1-V470, M1-L469, M1-L468, M1-T467, M1-R466, M1-A465, M1-V464, M1-S463, M1-1462, M1-A461, M1-S460, M1-A459, M1-A458, M1-A457, M1-A456, M1-E455, M1-V454, M1-G453, M1-T452, M1-E451, M1-T450, M1-L449, M1-E448, M1-L447, M1-V446, M1-T445, M1-Q444, M1-H443, M1-Q442, M1-M441, M1-A440, M1-S439, M1-V438, M1-Q437, M1-L436, M1-D435, M1-P434, M1-D433, M1-E432, M1-T431, M1-L430, M1-G429, M1-C428, M1-L427, M1 -N426, M1-L425, M1-D424, M1-Y423, M1-S422, M1-F421, M1-D420, M1-F419, M1-F418, M1-E417, M1-L416, M1-K415, M1-E414, M1-M413, M1-412, M1-S411, M1-L410, M1-M409, M1-D408, M1-Q407, M1-S406, M1-T405, M1-T404, M1-V403, M1-K402, M1-I401, M1-R400, M1-P399, M1-L398, M1-T397, M1-L396, M1-L395, M1-T394, M1-P393, M1-Q392, M1-F391, M1-K390, M1-S389, M1-M388, M1-E387, M1-L386, M1-K385, M1-E384, M1-M383, M1-382, M1-A381, M1-K380, M1-F379, M1-V378, M1-S377, M1-P376, M1-S375, M1-L374, M1-A373, M1-Q372, M1-E371, M1-M370, M1-D369, M1-E368, M1-L367, M1-R366, M1-H365, M1-K364, M1-L363, M1-N362, M1-Q361, M1-P360, M1-V359, M1-L358, M1-I357, M1-V356, M1-L355, M1-S354, M1-L353, M1-N352, M1-H351, M1-S350, M1-L349, M1-Q348, M1-L347, M1-Q346, M1-G345, M1-V344, M1-K343, M1-A342, M1-K341, M1-L340, M1-T339, M1-Q338, M1-D337, M1-336, M1-F335, M1-H334, M1-A333, M1-V332, M1-P331, M1-Y330, M1-K329, M1-K328, M1-S327, M1-N326, M1-M325, M1-M324, M1-P323, M1-V322, M1-K321, MI1-320, M1-V319, M1-S318, M1-N317, M1-K316, M1-F315, M1-H314, M1-F313, M1-P312, M1-E311, M1-M310, M1-R309, M1-T308, M1-K307, M1-K306, M1-P305, M1-D304, M1-F303, M1-T302, M1-T301, M1-K300, M1-W299, M1-K298, M1-A297, M1-S296, M1-L295, M1-Y294, MI1-293, M1-A292, M1-N291, M1-L290, M1-L289, M1-V288, M1-L287, M1-R286, M1-T285, M1-D284, M1-S283, M1-P282, M1-L281, M1-S280, M1-D279, M1-L278, M1-L277, M1-R276, M1-S275, MI1-274, M1-K273, M1-N272, M1-N271, M1-T270, M1-N269, M1-K268, M1-A267, M1-V266, M1-W265, M1-T264, M1-N263, M1-262, M1-L261, M1-E260, M1-L259, M1-N258, M1-A257, M1-D256, M1-S255, M1-N254, M1-N253, M1-S252, M1-L251, M1-V250, M1-R249, M1-P248, M1-S247, M1-S246, M1-S245, M1-Y244, M1-L243, M1-T242, M1-R241, M1-S240, M1-A239, M1-N238, M1-V237, M1-F236, M1-T235, M1-D234, M1-R233, M1-232, M1-A231, M1-L230, M1-D229, M1-P228, M1-S227, M1-H226, M1-F225, M1-224, M1-Q223, M1-S222, M1-V221, M1-S220, M1-T219, M1-V218, M1-G217, M1-K216, M1-T215, M1-T214, M1-F213, M1-G212, M1-K211, M1-L210, M1-A209, M1-Q208, M1-H207, M1-V206, M1-C205, M1-T204, M1-F203, M1-D202, M1-K201, M1-P200, M1-Y199, M1-S198, M1-L197, M1-I196, M1-S195, M1-E194, M1-L193, M1-N192, M1-T191, M1-K190, M1-T189, M1-N188, M1-Q187, M1-G186, M1-A185, M1-G184, M1-L183, M1-L182, M1-V181, M1-Q180, M1-T179, M1-L178, M1-L177, M1-S176, M1-A175, M1-I174, M1-S173, M1-F172, M1-P171, M1-S170, M1-F169, M1-A168, M1-M167, M1-N166, M1-T165, M1-E164, M1-V163, M1-K162, M1-K161, M1-M160, M1-A159, M1-S158, M1-F157, M1-A156, M1-H155, M1-Y154, M1-L153, M1-K152, M1-L151, M1-S150, M1-F149, M1-D148, M1-V147, M1-L146, M1-A145, M1-D144, M1-G143, M1-L142, M1-V141, M1-A140, M1-E139, M1-T138, M1-S137, M1-H136, M1-S135, M1-E134, M1-L133, M1-D132, M1-S131, M1-C130, M1-L129, M1-T128, M1-V127, M1-P126, M1-G125, M1-P124, M1-C123, M1-F122, M1-S 121, M1-G120, M1-T119, M1-T118, M1-P117, M1-Q116, M1-Ti 15, M1-P114, M1-S1 13, M1-D112, M1-T111, M1-P110, M1-L109, M1-Q108, M1-T107, M1-T106, M1-P105, M1-Q104, M1-T103, M1-P102, M1-Q10, M1-I100, M1-T99, M1-P98, M1-Q97, M1-T96, M1-T95, M1-P94, M1-E93, M1-T92, M1-T91, M1-P90, M1-Q89, M1-T88, M1-T87, M1-P86, M1-E85, M1-D84, M1-T83, M1-T82, M1-N81, M1-A80, M1-T79, M1-178, M1-K77, M1-T76, M1-A75, M1-S74, M1-N73, M1-T72, M1-T71, M1-S70, M1-N69, M1-T68, M1-T67, M1-P66, M1-L65, M1-S64, M1-S63, M1-V62, M1-E61, M1-L60, M1-159, M1-P58, M1-E57, M1-A56, M1-F55, M1-L54, M1-M53, M1-K52, M1-S51, M1-150, M1-V49, M1-T48, M1-T47, M1-A46, M1-V45, M1-K44, M1-G43, M1-E42, M1-G41, M1-R40, M1-D39, M1-Q38, M1-L37, M1-S36, M1-E35, M1-P34, M1-D33, M1-Q32, M1-S31, M1-S30, M1-S29, M1-S28, M1-T27, M1-A26, M1-N25, M1-P24, M1-N23, M1-S22, M1-S21, M1-A20, M1-R19, M1-D18, M1-G17, M1-A16, M1-L15, M1-L14, M1-L13, M1-L12, M1-L11, M1-L10, M1-T9, M1-L8, and/or M1-L7 of SEQ ID NO:26. Polynucleotide sequences encoding these polypeptides are also provided. The present invention also encompasses the use of these C-terminal C1NH (SNP_ID: AE105s4) deletion polypeptides as immunogenic and/or antigenic epitopes as described elsewhere herein.

[0193] Alternatively, preferred polypeptides of the present invention may comprise polypeptide sequences corresponding to, for example, internal regions of the C1NH (SNP_ID: AE105s4) polypeptide (e.g., any combination of both N- and C- terminal C1NH (SNP_ID: AE105s4) polypeptide deletions) of SEQ ID NO:26. For example, internal regions could be defined by the equation: amino acid NX to amino acid CX, wherein NX refers to any N-terminal deletion polypeptide amino acid of CINH (SNP_ID: AE105s4) (SEQ ID NO:26), and where CX refers to any C-terminal deletion polypeptide amino acid of ClNH (SNP_ID: AE105s4) (SEQ ID NO:26). Polynucleotides encoding these polypeptides are also provided. The present invention also encompasses the use of these polypeptides as an immunogenic and/or antigenic epitope as described elsewhere herein. Preferably, the resulting deletion polypeptide comprises the polypeptide polymorphic loci identified elsewhere herein for ClNH (SNP_ID: AE105s4), and more preferably comprises the polypeptide polymorphic allele identified elsewhere herein for C1NH (SNP_ID: AE105s4).

[0194] Features of the Polypeptide Encoded by Gene No:9

[0195] The present invention relates to isolated nucleic acid molecules comprising, or alternatively, consisting of all or a portion of the variant allele of the human C1 esterase inhibitor gene (e.g., wherein reference or wildtype C1 esterase inhibitor gene is exemplified by SEQ ID NO:21). Preferred portions are at least 10, preferably at least 20, preferably at least 40, preferably at least 100, contiguous polynucleotides and comprise a “G” at the nucleotide position corresponding to nucleotide 536 of the Cl esterase inhibitor gene, or a portion of SEQ ID NO:27. Alternatively, preferred portions are at least 10, preferably at least 20, preferably at least 40, preferably at least 100, contiguous polynucleotides and comprise a “C” at the nucleotide position corresponding to nucleotide 536 of the C1 esterase inhibitor gene, or a portion of SEQ ID NO:27. The invention further relates to isolated gene products, e.g., polypeptides and/or proteins, which are encoded by a nucleic acid molecule comprising all or a portion of the variant allele of the C1 esterase inhibitor gene.

[0196] In one embodiment, the invention relates to a method for predicting the likelihood that an individual will have a disorder associated with a “G” at the nucleotide position corresponding to nucleotide position 536 of SEQ ID NO:27 (or diagnosing or aiding in the diagnosis of such a disorder) comprising the steps of obtaining a DNA sample from an individual to be assessed and determining the nucleotide present at position 536 of SEQ ID NO:27. The presence of a “G” at this position indicates that the individual has a greater likelihood of having a disorder associated therewith than an individual having a “C” at that position, or a greater likelihood of having more severe symptoms.

[0197] Conversely, the invention relates to a method for predicting the likelihood that an individual will have a disorder associated with a “C” at the nucleotide position corresponding to nucleotide position 536 of SEQ ID NO:27 (or diagnosing or aiding in the diagnosis of such a disorder) comprising the steps of obtaining a DNA sample from an individual to be assessed and determining the nucleotide present at position 536 of SEQ ID NO:27. The presence of a “C” at this position indicates that the individual has a greater likelihood of having a disorder associated therewith than an individual having a “G” at that position, or a greater likelihood of having more severe symptoms.

[0198] The present invention further relates to isolated proteins or polypeptides comprising, or alternatively, consisting of all or a portion of the encoded variant amino acid sequence of the human C1 esterase inhibitor polypeptide (e.g., wherein reference or wildtype human Cl esterase inhibitor polypeptide is exemplified by SEQ ID NO:22). Preferred portions are at least 10, preferably at least 20, preferably at least 40, preferably at least 100, contiguous polypeptides and comprises a “G” at the amino acid position corresponding to amino acid 159 of the human C1 esterase inhibitor polypeptide, or a portion of SEQ ID NO:28. Alternatively, preferred portions are at least 10, preferably at least 20, preferably at least 40, preferably at least 100, contiguous polypeptides and comprises a “A” at the amino acid position corresponding to amino acid 159 of the human C1 esterase inhibitor protein, or a portion of SEQ ID NO:28. The invention further relates to isolated nucleic acid molecules encoding such polypeptides or proteins, as well as to antibodies that bind to such proteins or polypeptides.

[0199] Representative disorders which may be detected, diagnosed, identified, treated, prevented, and/or ameliorated by the present invention include, the following, non-limiting diseases and disorders: angioedema, cardiovascular diseases, angina pectoris, hypertension, heart failure, myocardial infarction, ventricular hypertrophy, cough associated with ACE inhibitors, cough associated with vasopeptidase inhibitors, vascular diseases, miscrovascular disease, vascular leak syndrome, aneurysm, stroke, embolism, thrombosis, endothelial dysfunction, coronary artery disease, arteriosclerosis, and/or atherosclerosis.

[0200] Additional disorders which may be detected, diagnosed, identified, treated, prevented, and/or ameliorated by the present invention include, the following, non-limiting diseases and disorders: hypotensive reactions during blood transfusions (Transfusion. 1999 Oct;39(10):1084-8.), hypersensitivity reactions during hemodialysis (Peptides. 1999;20(4):421-30.), sepsis, inflammatory arthritis, and enterocolitis (Clin Rev Allergy Immunol. 1998 Winter;16(4):365-84.), enterocolitis (Gut. 1998 Sep;43(3):365-74.), chronic granulomatous intestinal and systemic inflammation (FASEB J. 1998 Mar;12(3):325-33.), peptidoglycan-induced arthritis (Arthritis Rheum. 1997 Jul;40(7):1327-33.), arthritis (Proc Assoc Am Physicians. 1997 Jan;109(l):10-22.), intestinal inflammation (Dig Dis Sci. 1996 May;41(5):912-20.), acute phase response of inflammation (Peptides. 1996; 17(7): 1163-70.), asthma (J Appl Physiol 1995; 78: 1844-1852), chronic obstructive pulmonary disease (COPD), cough reflex, allergies, and/or neurogenic inflammation.

[0201] In preferred embodiments, the following N-terminal C1NH (SNP_ID: AE105s5) deletion polypeptides are encompassed by the present invention: M1-A500, A2-A500, S3-A500, R4-A500, L5-A500, T6-A500, L7-A500, L8-A500, T9-A500, L10-A500, L11-A500, L12-A500, L13-A500, L14-A500, L15-A500, A16-A500, G17-A500, D18-A500, R19-A500, A20-A500, S21-A500, S22-A500, N23-A500, P24-A500, N25-A500, A26-A500, T27-A500, S28-A500, S29-A500, S30-A500, S31 -A500, Q32-A500, D33-A500, P34-A500, E35-A500, S36-A500, L37-A500, Q38-A500, D39-A500, R40-A500, G41-A500, E42-A500, G43-A500, K44-A500, V45-A500, A46-A500, T47-A500, T48-A500, V49-A500, I150-A500, S51-A500, K52-A500, M53-A500, L54-A500, F55-A500, V56-A500, E57-A500, P58-A500, I59-A500, L60-A500, E61-A500, V62-A500, S63-A500, S64-A500, L65-A500, P66-A500, T67-A500, T68-A500, N69-A500, S70-A500, T71-A500, T72-A500, N73-A500, S74-A500, A75-A500, T76-A500, K77-A500, I78-A500, T79-A500, A80-A500, N81-A500, T82-A500, T83-A500, D84-A500, E85-A500, P86-A500, T87-A500, T88-A500, Q89-A500, P90-A500, T91-A500, T92-A500, E93-A500, P94-A500, T95-A500, T96-A500, Q97-A500, P98-A500, T99-A500, I100-A500, Q10-A500, P102-A500, T103-A500, Q104-A500, P105-A500, T106-A500, T107-A500, Q108-A500, L109-A500, P110-A500, T111-A500, D112-A500, S113-A500, P114-A500, T115-A500, Q116-A500, P117-A500, T118-A500, T119-A500, G120-A500, S121-A500, F122-A500, C123-A500, P124-A500, G125-A500, P126-A500, V127-A500, T128-A500, L129-A500, C130-A500, S131-A500, D132-A500, L133-A500, E134-A500, S135-A500, H136-A500, S137-A500, T138-A500, E139-A500, A140-A500, V141-A500, L142-A500, G143-A500, D144-A500, A145-A500, L146-A500, V147-A500, D148-A500, F149-A500, S150-A500, L151-A500, K152-A500, L153-A500, Y154-A500, H155-A500, A156-A500, F157-A500, S158-A500, G159-A500, M160-A500, K161-A500, K162-A500, V163-A500, E164-A500, T165-A500, N166-A500, M167-A500, A168-A500, F169-A500, S170-A500, P171-A500, F172-A500, S173-A500, I174-A500, A175-A500, S176-A500, L177-A500, L178-A500, T179-A500, Q180-A500, V181-A500, L182-A500, L183-A500, G184-A500, A185-A500, G186-A500, Q187-A500, N188-A500, T189-A500, K190-A500, T191-A500, N192-A500, L193-A500, E194-A500, S195-A500, I196-A500, L197-A500, S198-A500, Y199-A500, P200-A500, K201-A500, D202-A500, F203-A500, T204-A500, C205-A500, V206-A500, H207-A500, Q208-A500, A209-A500, L210-A500, K211-A500, G212-A500, F213-A500, T214-A500, T215-A500, K216-A500, G217-A500, V218-A500, T219-A500, S220-A500, V221-A500, S222-A500, Q223-A500, I224-A500, F225-A500, H226-A500, S227-A500, P228-A500, D229-A500, L230-A500, A231-A500, I232-A500, R233-A500, D234-A500, T235-A500, F236-A500, V237-A500, N238-A500, A239-A500, S240-A500, R241-A500, T242-A500, L243-A500, Y244-A500, S245-A500, S246-A500, S247-A500, P248-A500, R249-A500, V250-A500, L251-A500, S252-A500, N253-A500, N254-A500, S255-A500, D256-A500, A257-A500, N258-A500, L259-A500, E260-A500, L261-A500, I262-A500, N263-A500, T264-A500, W265-A500, V266-A500, A267-A500, K268-A500, N269-A500, T270-A500, N271-A500, N272-A500, K273-A500, I274-A500, S275-A500, R276-A500, L277-A500, L278-A500, D279-A500, S280-A500, L281-A500, P282-A500, S283-A500, D284-A500, T285-A500, R286-A500, L287-A500, V288-A500, L289-A500, L290-A500, N291-A500, A292-A500, I293-A500, Y294-A500, L295-A500, S296-A500, A297-A500, K298-A500, W299-A500, K300-A500, T301-A500, T302-A500, F303-A500, D304-A500, P305-A500, K306-A500, K307-A500, T308-A500, R309-A500, M310-A500, E311-A500, P312-A500, F313-A500, H314-A500, F315-A500, K316-A500, N317-A500, S318-A500, V319-A500, I320-A500, K321-A500, V322-A500, P323-A500, M324-A500, M325-A500, N326-A500, S327-A500, K328-A500, K329-A500, Y330-A500, P331-A500, V332-A500, A333-A500, H334-A500, F335-A500, I336-A500, D337-A500, Q338-A500, T339-A500, L340-A500, K341-A500, A342-A500, K343-A500, V344-A500, G345-A500, Q346-A500, L347-A500, Q348-A500, L349-A500, S350-A500, H351-A500, N352-A500, L353-A500, S354-A500, L355-A500, V356-A500, I357-A500, L358-A500, V359-A500, P360-A500, Q361-A500, N362-A500, L363-A500, K364-A500, H365-A500, R366-A500, L367-A500, E368-A500, D369-A500, M370-A500, E371-A500, Q372-A500, A373-A500, L374-A500, S375-A500, P376-A500, S377-A500, V378-A500, F379-A500, K380-A500, A381-A500, I382-A500, M383-A500, E384-A500, K385-A500, L386-A500, E387-A500, M388-A500, S389-A500, K390-A500, F391-A500, Q392-A500, P393-A500, T394-A500, L395-A500, L396-A500, T397-A500, L398-A500, P399-A500, R400-A500, I401-A500, K402-A500, V403-A500, T404-A500, T405-A500, S406-A500, Q407-A500, D408-A500, M409-A500, L410-A500, S411-A500, I412-A500, M413-A500, E414-A500, K415-A500, L416-A500, E417-A500, F418-A500, F419-A500, D420-A500, F421-A500, S422-A500, Y423-A500, D424-A500, L425-A500, N426-A500, A27-A500, C428-A500, G429-A500, L430-A500, T431-A500, E432-A500, D433-A500, P434-A500, D435-A500, L436-A500, Q437-A500, V438-A500, S439-A500, A440-A500, M441-A500, Q442-A500, H443-A500, Q444-A500, T445-A500, V446-A500, L447-A500, E448-A500, L449-A500, T450-A500, E451-A500, T452-A500, G453-A500, V454-A500, E455-A500, A456-A500, A457-A500, A458-A500, A459-A500, S460-A500, A461-A500, 1462-A500, S463-A500, V464-A500, A465-A500, R466-A500, T467-A500, L468-A500, L469-A500, V470-A500, F471-A500, E472-A500, V473-A500, Q474-A500, Q475-A500, P476-A500, F477-A500, L478-A500, F479-A500, V480-A500, L481-A500, W482-A500, D483-A500, Q484-A500, Q485-A500, H486-A500, K487-A500, F488-A500, P489-A500, V490-A500, F491-A500, M492-A500, G493-A500, and/or R494-A500 of SEQ ID NO:28. Polynucleotide sequences encoding these polypeptides are also provided. The present invention also encompasses the use of these N-terminal C1NH (SNP_ID: AE105s5) deletion polypeptides as immunogenic and/or antigenic epitopes as described elsewhere herein.

[0202] In preferred embodiments, the following C-terminal C1NH (SNP_ID: AE105s5) deletion polypeptides are encompassed by the present invention: M1-A500, M1-R499, M1-P498, M1-D497, M1-Y496, M1-V495, M1-R494, M1-G493, M1-M492, M1-F491, M1-V490, M1-P489, M1-F488, M1-K487, M1-H486, M1-Q485, M1-Q484, M1-D483, M1-W482, M1-L481, M1-V480, M1-F479, M1-L478, M1-F477, M1-P476, M1-Q475, M1-Q474, M1-V473, M1-E472, M1-F471, M1-V470, M1-L469, M1-L468, M1-T467, M1-R466, M1-A465, M1-V464, M1-S463, M1-1462, M1-A461, M1-S460, M1-A459, M1-A458, M1-A457, M1-A456, M1-E455, M1-V454, M1-G453, M1-T452, M1-E451, M1-T450, M1-L449, M1-E448, M1-L447, M1-V446, M1-T445, M1-Q444, M1-H443, M1-Q442, M1-M441, M1-A440, M1-S439, M1-V438, M1-Q437, M1-LA36, M1-D435, M1-P434, M1-D433, M1-E432, M1-T431, M1-L430, M1-G429, M1-C428, M1-L427, M1-N426, M1-L425, M1-D424, M1-Y423, M1-S422, M1-F421, M1-D420, M1-F419, M1-F418, M1-E417, M1-L416, M1-K415, M1-E414, M1-M413, M1-I412, M1-S411, M1-L410, M1-M409, M1-D408, M1-Q407, M1-S406, M1-T405, M1-T404, M1-V403, M1-K402, M1-I401, M1-R400, M1-P399, M1-L398, M1-T397, M1-L396, M1-L395, M1-T394, M1-P393, M1-Q392, M1-F391, M1-K390, M1-S389, M1-M388, M1-E387, M1-L386, M1-K385, M1-E384, M1-M383, M1-I382, M1-A381, M1-K380, M1-F379, M1-V378, M1-S377, M1-P376, M1-S375, M1-L374, M1-A373, M1-Q372, M1-E371, M1-M370, M1-D369, M1-E368, M1-L367, M1-R366, M1-H365, M1-K364, M1-L363, M1-N362, M1-Q361, M1-P360, M1-V359, M1-L358, M1-I357, M1-V356, M1-L355, M1-S354, M1-L353, M1-N352, M1-H351, M1-S350, M1-L349, M1-Q348, M1-L347, M1-Q346, M1-G345, M1-V344, M1-K343, M1-A342, M1-K341, M1-L340, M1-T339, M1-Q338, M1-D337, M1-I336, M1-F335, M1-H334, M1-A333, M1-V332, M1-P331, M1-Y330, M1-K329, M1-K328, M1-S327, M1-N326, M1-M325, M1-M324, M1-P323, M1-V322, M1-K321, M1-I320, M1-V319, M1-S318, M1-N317, M1-K316, M1-F315, M1-H314, M1-F313, M1-P312, M1-E311, M1-M310, M1-R309, M1-T308, M1-K307, M1-K306, M1-P305, M1-D304, M1-F303, M1-T302, M1-T301, M1-K300, M1-W299, M1-K298, M1-A297, M1-S296, M1-L295, M1-Y294, M1-I293, M1-A292, M1-N291, M1-L290, M1-L289, M1-V288, M1-L287, M1-R286, M1-T285, M1-D284, M1-S283, M1-P282, M1-L281, M1-S280, M1-D279, M1-L278, M1-L277, M1-R276, M1-S275, M1-I274, M1-K273, M1-N272, M1-N271, M1-T270, M1-N269, M1-K268, M1-A267, M1-V266, M1-W265, M1-T264, M1-N263, M1-I262, M1-L261, M1-E260, M1-L259, M1-N258, M1-A257, M1-D256, M1-S255, M1-N254, M1-N253, M1-S252, M1-L251, M1-V250, M1-R249, M1-P248, M1-S247, M1-S246, M1-S245, M1-Y244, M1-L243, M1-T242, M1-R241, M1-S240, M1-A239, M1-N238, M1-V237, M1-F236, M1-T235, M1-D234, M1-R233, M1-I232, M1-A231, M1-L230, M1-D229, M1-P228, M1-S227, M1-H226, M1-F225, M1-I224, M1-Q223, M1-S222, M1-V221, M1-S220, M1-T219, M1-V218, M1-G217, M1-K216, M1-T215, M1-T214, M1-F213, M1-G212, M1-K211, M1-L210, M1-A209, M1-Q208, M1-H207, M1-V206, M1-C205, M1-T204, M1-F203, M1-D202, M1-K201, M1-P200, M1-Y199, M1-S198, M1-L197, M1-I196, M1-S195, M1-E194, M1-L193, M1-N192, M1-T191, M1-K190, M1-T189, M1-N188, M1-Q187, M1-G186, M1-A185, M1-G184, M1-L183, M1-L182, M1-V181, M1-Q180, M1-T179, M1-L178, M1-L177, M1-S176, M1-A175, M1-I174, M1-S173, M1-F172, M1-P171, M1-S170, M1-F169, M1-A168, M1-M167, M1-N166, M1-T165, M1-E164, M1-V163, M1-K162, M1-K161, M1-M160, M1-G159, M1-S158, M1-F157, M1-A156, M1-H155, M1-Y154, M1-L153, M1-K152, M1-L151, M1-S150, M1-F149, M1-D148, M1-V147, M1-L146, M1-A145, M1-D144, M1-G143, M1-L142, M1-V141, M1-A140, M1-E139, M1-T138, M1-S137, M1-H136, M1-S135, M1-E134, M1-L133, M1-D132, M1-S131, M1-C130, M1-L129, M1-T128, M1-V127, M1-P126, M1-G125, M1-P124, M1-C123, M1-F122, M1-S121, M1-G120, M1-T119, M1-T118, M1-P117, M1-Q116, M1-T115, M1-P114, M1-S113, M1-D112, M1-T111, M1-P110, M1-L109, M1-Q108, M1-T107, M1-T106, M1-P105, M1-Q104, M1-T103, M1-P102, M1-Q101, M1-100, M1-T99, M1-P98, M1-Q97, M1-T96, M1-T95, M1-P94, M1-E93, M1-T92, M1-T91, M1-P90, M1-Q89, M1-T88, M1-T87, M1-P86, M1-E85, M1-D84, M1-T83, M1-T82, M1-N81, M1-A80, M1-T79, M1-178, M1-K77, M1-T76, M1-A75, M1-S74, M1-N73, M1-T72, M1-T71, M1-S70, M1-N69, M1-T68, M1-T67, M1-P66, M1-L65, M1-S64, M1-S63, M1-V62, M1-E61, M1-L60, M1-159, M1-P58, M1-E57, M1-V56, M1-F55, M1-L54, M1-M53, M1-K52, M1-S51, M1-150, M1-V49, M1-T48, M1-T47, M1-A46, M1-V45, M1-K44, M1-G43, M1-E42, M1-G41, M1-R40, M1-D39, M1-Q38, M1-L37, M1-S36, M1-E35, M1-P34, M1-D33, M1-Q32, M1-S31, M1-S30, M1-S29, M1-S28, M1-T27, M1-A26, M1-N25, M1-P24, M1-N23, M1-S22, M1-S21, M1-A20, M1-R19, M1-D18, M1-GI7, M1-A16, M1-L15, M1-L14, M1-L13, M1-L12, M1-L11, M1-L10, M1-T9, M1-L8, and/or M1-L7 of SEQ ID NO:28. Polynucleotide sequences encoding these polypeptides are also provided. The present invention also encompasses the use of these C-terminal C1NH (SNP_ID: AE105s5) deletion polypeptides as immunogenic and/or antigenic epitopes as described elsewhere herein.

[0203] Alternatively, preferred polypeptides of the present invention may comprise polypeptide sequences corresponding to, for example, internal regions of the ClNH (SNP_ID: AE105s5) polypeptide (e.g., any combination of both N- and C- terminal C1NH (SNP_ID: AE105s5) polypeptide deletions) of SEQ ID NO:28. For example, internal regions could be defined by the equation: amino acid NX to amino acid CX, wherein NX refers to any N-terminal deletion polypeptide amino acid of C1NH (SNP_ID: AE105s5) (SEQ ID NO:28), and where CX refers to any C-terminal deletion polypeptide amino acid of CINH (SNP_If): AE105s5) (SEQ ID NO:28). Polynucleotides encoding these polypeptides are also provided. The present invention also encompasses the use of these polypeptides as an immunogenic and/or antigenic epitope as described elsewhere herein. Preferably, the resulting deletion polypeptide comprises the polypeptide polymorphic loci identified elsewhere herein for C1NH (SNP_ID: AE105s5), and more preferably comprises the polypeptide polymorphic allele identified elsewhere herein for C1NH (SNP_ID: AE105s5).

[0204] Features of the Polypeptide Encoded by Gene No:10

[0205] The present invention relates to isolated nucleic acid molecules comprising, or alternatively, consisting of all or a portion of the variant allele of the human C1 esterase inhibitor gene (e.g., wherein reference or wildtype C1 esterase inhibitor gene is exemplified by SEQ ID NO:21). Preferred portions are at least 10, preferably at least 20, preferably at least 40, preferably at least 100, contiguous polynucleotides and comprise an “A” at the nucleotide position corresponding to nucleotide 1498 of the C1 esterase inhibitor gene, or a portion of SEQ ID NO:29. Alternatively, preferred portions are at least 10, preferably at least 20, preferably at least 40, preferably at least 100, contiguous polynucleotides and comprise a “G” at the nucleotide position corresponding to nucleotide 1498 of the C1 esterase inhibitor gene, or a portion of SEQ ID NO:29. The invention further relates to isolated gene products, e.g., polypeptides and/or proteins, which are encoded by a nucleic acid molecule comprising all or a portion of the variant allele of the C1 esterase inhibitor gene.

[0206] In one embodiment, the invention relates to a method for predicting the likelihood that an individual will have a disorder associated with a “A” at the nucleotide position corresponding to nucleotide position 1498 of SEQ ID NO:29 (or diagnosing or aiding in the diagnosis of such a disorder) comprising the steps of obtaining a DNA sample from an individual to be assessed and determining the nucleotide present at position 1498 of SEQ ID NO:29. The presence of a “A” at this position indicates that the individual has a greater likelihood of having a disorder associated therewith than an individual having a “G” at that position, or a greater likelihood of having more severe symptoms.

[0207] Conversely, the invention relates to a method for predicting the likelihood that an individual will have a disorder associated with a “G” at the nucleotide position corresponding to nucleotide position 1498 of SEQ ID NO:29 (or diagnosing or aiding in the diagnosis of such a disorder) comprising the steps of obtaining a DNA sample from an individual to be assessed and determining the nucleotide present at position 1498 of SEQ ID NO:29. The presence of a “G” at this position indicates that the individual has a greater likelihood of having a disorder associated therewith than an individual having a “A” at that position, or a greater likelihood of having more severe symptoms.

[0208] The present invention further relates to isolated proteins or polypeptides comprising, or alternatively, consisting of all or a portion of the encoded variant amino acid sequence of the human C1 esterase inhibitor polypeptide (e.g., wherein reference or wildtype human Cl esterase inhibitor polypeptide is exemplified by SEQ ID NO:22). Preferred portions are at least 10, preferably at least 20, preferably at least 40, preferably at least 100, contiguous polypeptides and comprises a “M” at the amino acid position corresponding to amino acid 480 of the human C1 esterase inhibitor polypeptide, or a portion of SEQ ID NO:30. Alternatively, preferred portions are at least 10, preferably at least 20, preferably at least 40, preferably at least 100, contiguous polypeptides and comprises a “V” at the amino acid position corresponding to amino acid 480 of the human C1 esterase inhibitor protein, or a portion of SEQ ID NO:30. The invention further relates to isolated nucleic acid molecules encoding such polypeptides or proteins, as well as to antibodies that bind to such proteins or polypeptides.

[0209] Representative disorders which may be detected, diagnosed, identified, treated, prevented, and/or ameliorated by the present invention include, the following, non-limiting diseases and disorders: angioedema, cardiovascular diseases, angina pectoris, hypertension, heart failure, myocardial infarction, ventricular hypertrophy, cough associated with ACE inhibitors, cough associated with vasopeptidase inhibitors, vascular diseases, miscrovascular disease, vascular leak syndrome, aneurysm, stroke, embolism, thrombosis, endothelial dysfunction, coronary artery disease, arteriosclerosis, and/or atherosclerosis.

[0210] Additional disorders which may be detected, diagnosed, identified, treated, prevented, and/or ameliorated by the present invention include, the following, non-limiting diseases and disorders: hypotensive reactions during blood transfusions (Transfusion. 1999 Oct;39(10): 1084-8.), hypersensitivity reactions during hemodialysis (Peptides. 1999;20(4):421-30.), sepsis, inflammatory arthritis, and enterocolitis (Clin Rev Allergy Immunol. 1998 Winter;16(4):365-84.), enterocolitis (Gut. 1998 Sep;43(3):365-74.), chronic granulomatous intestinal and systemic inflammation (FASEB J. 1998 Mar;12(3):325-33.), peptidoglycan-induced arthritis (Arthritis Rheum. 1997 Jul;40(7):1327-33.), arthritis (Proc Assoc Am Physicians. 1997 Jan;109(1):10-22.), intestinal inflammation (Dig Dis Sci. 1996 May;41(5):912-20.), acute phase response of inflammation (Peptides. 1996; 17(7): 1163-70.), asthma (J Appl Physiol 1995; 78: 1844-1852), chronic obstructive pulmonary disease (COPD), cough reflex, allergies, and/or neurogenic inflammation.

[0211] In preferred embodiments, the following N-terminal CINH (SNP_ID: AE105s6) deletion polypeptides are encompassed by the present invention: M1-A500, A2-A500, S3-A500, R4-A500, L5-A500, T6-A500, L7-A500, L8-A500, T9-A500, L10-A500, L11-A500, L12-A500, L13-A500, L14-A500, L15-A500, A16-A500, G17-A500, D18-A500, R19-A500, A20-A500, S21-A500, S22-A500, N23-A500, P24-A500, N25-A500, A26-A500, T27-A500, S28-A500, S29-A500, S30-A500, S31-A500, Q32-A500, D33-A500, P34-A500, E35-A500, S36-A500, L37-A500, Q38-A500, D39-A500, R40-A500, G41-A500, E42-A500, G43-A500, K44-A500, V45-A500, A46-A500, T47-A500, T48-A500, V49-A500, I50-A500, S51-A500, K52-A500, M53-A500, L54-A500, F55-A500, V56-A500, E57-A500, P58-A500, 159-A500, L60-A500, E61-A500, V62-A500, S63-A500, S64-A500, L65-A500, P66-A500, T67-A500, T68-A500, N69-A500, S70-A500, T71-A500, T72-A500, N73-A500, S74-A500, A75-A500, T76-A500, K77-A500, 178-A500, T79-A500, A80-A500, N81-A500, T82-A500, T83-A500, D84-A500, E85-A500, P86-A500, T87-A500, T88-A500, Q89-A500, P90-A500, T91-A500, T92-A500, E93-A500, P94-A500, T95-A500, T96-A500, Q97-A500, P98-A500, T99-A500, I100-A500, Q101-A500, P102-A500, T103-A500, Q104-A500, P105-A500, T106-A500, T107-A500, Q108-A500, L109-A500, P110-A500, T11-A500, D112-A500, S113-A500, P114-A500, T115-A500, Q116-A500, P117-A500, T118-A500, T119-A500, G120-A500, S121-A500, F122-A500, C123-A500, P124-A500, G125-A500, P126-A500, V127-A500, T128-A500, L129-A500, C130-A500, S131-A500, D132-A500, L133-A500, E134-A500, S135-A500, H136-A500, S137-A500, T138-A500, E139-A500, A140-A500, V141-A500, L142-A500, G143-A500, D144-A500, A145-A500, L146-A500, V147-A500, D148-A500, F149-A500, S150-A500, L151-A500, K152-A500, L153-A500, Y154-A500, H155-A500, A156-A500, F157-A500, S158-A500, A159-A500, M160-A500, K161-A500, K162-A500, V163-A500, E164-A500, T165-A500, N166-A500, M167-A500, A168-A500, F169-A500, S170-A500, P171-A500, F172-A500, S173-A500, I174-A500, A175-A500, S176-A500, L177-A500, L178-A500, T179-A500, Q180-A500, V181-A500, L182-A500, L183-A500, G184-A500, A185-A500, G186-A500, Q187-A500, N188-A500, T189-A500, K190-A500, T191-A500, N192-A500, L193-A500, E194-A500, S195-A500, I196-A500, L197-A500, S198-A500, Y199-A500, P200-A500, K201-A500, D202-A500, F203-A500, T204-A500, C205-A500, V206-A500, H207-A500, Q208-A500, A209-A500, L210-A500, K211-A500, G212-A500, F213-A500, T214-A500, T215-A500, K216-A500, G217-A500, V218-A500, T219-A500, S220-A500, V221-A500, S222-A500, Q223-A500, I224-A500, F225-A500, H226-A500, S227-A500, P228-A500, D229-A500, L230-A500, A231-A500, I232-A500, R233-A500, D234-A500, T235-A500, F236-A500, V237-A500, N238-A500, A239-A500, S240-A500, R241-A500, T242-A500, L243-A500, Y244-A500, S245-A500, S246-A500, S247-A500, P248-A500, R249-A500, V250-A500, L251-A500, S252-A500, N253-A500, N254-A500, S255-A500, D256-A500, A257-A500, N258-A500, L259-A500, E260-A500, L261-A500, I262-A500, N263-A500, T264-A500, W265-A500, V266-A500, A267-A500, K268-A500, N269-A500, T270-A500, N271-A500, N272-A500, K273-A500, I274-A500, S275-A500, R276-A500, L277-A500, L278-A500, D279-A500, S280-A500, L281-A500, P282-A500, S283-A500, D284-A500, T285-A500, R286-A500, L287-A500, V288-A500, L289-A500, L290-A500, N291-A500, A292-A500, I293-A500, Y294-A500, L295-A500, S296-A500, A297-A500, K298-A500, W299-A500, K300-A500, T301-A500, T302-A500, F303-A500, D304-A500, P305-A500, K306-A500, K307-A500, T308-A500, R309-A500, M310-A500, E311-A500, P312-A500, F313-A500, H314-A500, F315-A500, K316-A500, N317-A500, S318-A500, V319-A500, I320-A500, K321-A500, V322-A500, P323-A500, M324-A500, M325-A500, N326-A500, S327-A500, K328-A500, K329-A500, Y330-A500, P331-A500, V332-A500, A333-A500, H334-A500, F335-A500, I336-A500, D337-A500, Q338-A500, T339-A500, L340-A500, K341-A500, A342-A500, K343-A500, V344-A500, G345-A500, Q346-A500, L347-A500, Q348-A500, L349-A500, S350-A500, H351-A500, N352-A500, L353-A500, S354-A500, L355-A500, V356-A500, I357-A500, L358-A500, V359-A500, P360-A500, Q361-A500, N362-A500, L363-A500, K364-A500, H365-A500, R366-A500, L367-A500, E368-A500, D369-A500, M370-A500, E371-A500, Q372-A500, A373-A500, L374-A500, S375-A500, P376-A500, S377-A500, V378-A500, F379-A500, K380-A500, A381-A500, I382-A500, M383-A500, E384-A500, K385-A500, L386-A500, E387-A500, M388-A500, S389-A500, K390-A500, F391-A500, Q392-A500, P393-A500, T394-A500, L395-A500, L396-A500, T397-A500, L398-A500, P399-A500, R400-A500, I401-A500, K402-A500, V403-A500, T404-A500, T405-A500, S406-A500, Q407-A500, D408-A500, M409-A500, L410-A500, S411-A500, I412-A500, M413-A500, E414-A500, K415-A500, L416-A500, E417-A500, F418-A500, F419-A500, D420-A500, F421-A500, S422-A500, Y423-A500, D424-A500, L425-A500, N426-A500, L427-A500, C428-A500, G429-A500, L430-A500, T431-A500, E432-A500, D433-A500, P434-A500, D435-A500, L436-A500, Q437-A500, V438-A500, S439-A500, A440-A500, M441-A500, Q442-A500, H443-A500, Q444-A500, T445-A500, V446-A500, L447-A500, E448-A500, L449-A500, T450-A500, E451-A500, T452-A500, G453-A500, V454-A500, E455-A500, A456-A500, A457-A500, A458-A500, A459-A500, S460-A500, A461-A500, 1462-A500, S463-A500, V464-A500, A465-A500, R466-A500, T467-A500, L468-A500, L469-A500, V470-A500, F471-A500, E472-A500, V473-A500, Q474-A500, Q475-A500, P476-A500, F477-A500, L478-A500, F479-A500, M480-A500, L481-A500, W482-A500, D483-A500, Q484-A500, Q485-A500, H486-A500, K487-A500, F488-A500, P489-A500, V490-A500, F491-A500, M492-A500, G493-A500, and/or R494-A500 of SEQ ID NO:30. Polynucleotide sequences encoding these polypeptides are also provided. The present invention also encompasses the use of these N-terminal CINH (SNP_ID: AE105s6) deletion polypeptides as immunogenic and/or antigenic epitopes as described elsewhere herein.

[0212] In preferred embodiments, the following C-terminal CINH (SNP_ID: AE105s6) deletion polypeptides are encompassed by the present invention: M1-A500, M1-R499, M1-P498, M1-D497, M1-Y496, M1-V495, M1-R494, M1-G493, M1-M492, M1-F491, M1-V490, M1-P489, M1-F488, M1-K487, M1-H486, M1-Q485, M1-Q484, M1-D483, M1-W482, M1-L481, M1-M480, M1-F479, M1-L478, M1-F477, M1-P476, M1-Q475, M1-Q474, M1-V473, M1-E472, M1-F471, M1-V470, M1-L469, M1-L468, M1-T467, M1-R466, M1-A465, M1-V464, M1-S463, M1-462, M1-A461, M1-S460, M1-A459, M1-A458, M1-A457, M1-A456, M1-E455, M1-V454, M1-G453, M1-T452, M1-E451, M1-T450, M1-L449, M1-E448, M1-L447, M1-V446, M1-T445, M1-Q444, M1-H443, M1-Q442, M1-M441, M1-A440, M1-S439, M1-V438, M1-Q437, M1-L436, M1-D435, M1-P434, M1-D433, M1-E432, M1-T431, M1-L430, M1-G429, M1-C428, M1-L427, M1-N426, M1-L425, M1-D424, M1-Y423, M1-S422, M1-F421, M1-D420, M1-F419, M1-F418, M1-E417, M1-L416, M1-K415, M1-E414, M1-M413, M1-I412, M1-S411, M1-L410, M1-M409, M1-D408, M1-Q407, M1-S406, M1-T405, M1-T404, M1-V403, M1-K402, M1-I401, M1-R400, M1-P399, M1-L398, M1-T397, M1-L396, M1-L395, M1-T394, M1-P393, M1-Q392, M1-F391, M1-K390, M1-S389, M1-M388, M1-E387, M1-L386, M1-K385, M1-E384, M1-M383, M1-I382, M1-A381, M1-K380, M1-F379, M1-V378, M1-S377, M1-P376, M1-S375, M1-L374, M1-A373, M1-Q372, M1-E371, M1-M370, M1-D369, M1-E368, M1-L367, M1-R366, M1-H365, M1-K364, M1-L363, M1-N362, M1-Q361, M1-P360, M1-V359, M1-L358, M1-I357, M1-V356, M1-L355, M1-S354, M1-L353, M1-N352, M1-H351, M1-S350, M1-L349, M1-Q348, M1-L347, M1-Q346, M1-G345, M1-V344, M1-K343, M1-A342, M1-K341, M1-L340, M1-T339, M1-Q338, M1-D337, M1-I336, M1-F335, M1-H334, M1-A333, M1-V332, M1-P331, M1-Y330, M1-K329, M1-K328, M1-S327, M1-N326, M1-M325, M1-M324, M1-P323, M1-V322, M1-K321, M1-I320, M1-V319, M1-S318, M1-N317, M1-K316, M1-F315, M1-H314, M1-F313, M1-P312, M1-E311, M1-M310, M1-R309, M1-T308, M1-K307, M1-K306, M1-P305, M1-D304, M1-F303, M1-T302, M1-T301, M1-K300, M1-W299, M1-K298, M1-A297, M1-S296, M1-L295, M1-Y294, M1-I293, M1-A292, M1-N291, M1-L290, M1-L289, M1-V288, M1-L287, M1-R286, M1-T285, M1-D284, M1-S283, M1-P282, M1-L281, M1-S280, M1-D279, M1-L278, M1-L277, M1-R276, M1-S275, M1-I274, M1-K273, M1-N272, M1-N271, M1-T270, M1-N269, M1-K268, M1-A267, M1-V266, M1-W265, M1-T264, M1-N263, M1-I262, M1-L261, M1-E260, M1-L259, M1-N258, M1-A257, M1-D256, M1-S255, M1-N254, M1-N253, M1-S252, M1-L251, M1-V250, M1-R249, M1-P248, M1-S247, M1-S246, M1-S245, M1-Y244, M1-L243, M1-T242, M1-R241, M1-S240, M1-A239, M1-N238, M1-V237, M1-F236, M1-T235, M1-D234, M1-R233, M1-I232, M1-A231, M1-L230, M1-D229, M1-P228, M1-S227, M1-H226, M1-F225, M1-I224, M1-Q223, M1-S222, M1-V221, M1-S220, M1-T219, M1-V218, M1-G217, M1-K216, M1-T215, M1-T214, M1-F213, M1-G212, M1-K211, M1-L210, M1-A209, M1-Q208, M1-H207, M1-V206, M1-C205, M1-T204, M1-F203, M1-D202, M1-K201, M1-P200, M1-Y199, M1-S198, M1-L197, M1-I196, M1-S195, M1-E194, M1-L193, M1-N192, M1-T191, M1-K190, M1-T189, M1-N188, M1-Q187, M1-G186, M1-A185, M1-G184, M1-L183, M1-L182, M1-V181, M1-Q180, M1-T179, M1-L178, M1-L177, M1-S176, M1-A175, M1-I174, M1-S173, M1-F172, M1-P171, M1-S170, M1-F169, M1-A168, M1-M167, M1-N166, M1-T165, M1-E164, M1-V163, M1-K162, M1-K161, M1-M160, M1-A159, M1-S158, M1-F157, M1-A156, M1-H155, M1-Y154, M1-L153, M1-K152, M1-L151, M1-S150, M1-F149, M1-D148, M1-V147, M1-L146, M1-A145, M1-D144, M1-G143, M1-L142, M1-V141, M1-A140, M1-E139, M1-T138, M1-S137, M1-H136, M1-S135, M1-E134, M1-L133, M1-D132, M1-S131, M1-C130, M1-L129, M1-T128, M1-V127, M1-P126, M1-G125, M1-P124, M1-C123, M1-F122, M1-S121, M1-G120, M1-T119, M1-T118, M1-P117, M1-Q116, M1-T115, M1-P114, M1-S113, M1-D112, M1-T111, M1-P111, M1-L109, M1-Q108, M1-T107, M1-T106, M1-P105, M1-Q104, M1-T103, M1-P102, M1-Q101, M1-I100, M1-T99, M1-P98, M1-Q97, M1-T96, M1-T95, M1-P94, M1-E93, M1-T92, M1-T91, M1-P90, M1-Q89, M1-T88, M1-T87, M1-P86, M1-E85, M1-D84, M1-T83, M1-T82, M1-N81, M1-A80, M1-T79, M1-178, M1-K77, M1-T76, M1-A75, M1-S74, M1-N73, M1-T72, M1-T71, M1-S70, M1-N69, M1-T68, M1-T67, M1-P66, M1-L65, M1-S64, M1-S63, M1-V62, M1-E61, M1-L60, M1-159, M1-P58, M1-E57, M1-V56, M1-F55, M1-L54, M1-M53, M1-K52, M1-S51, M1-150, M1-V49, M1-T48, M1-T47, M1-A46, M1-V45, M1-K44, M1-G43, M1-E42, M1-G41, M1-R40, M1-D39, M1-Q38, M1-L37, M1-S36, M1-E35, M1-P34, M1-D33, M1-Q32, M1-S31, M1-S30, M1-S29, M1-S28, M1-T27, M1-A26, M1-N25, M1-P24, M1-N23, M1-S22, M1-S21, M1-A20, M1-R19, M1-D18, M1-G17, M1-A16, M1-L15, M1-L14, M1-L13, M1-L12, M1-L11, M1-L10, M1-T9, M1-L8, and/or M1-L7 of SEQ ID NO:30. Polynucleotide sequences encoding these polypeptides are also provided. The present invention also encompasses the use of these C-terminal CINH (SNP_ID: AE105s6) deletion polypeptides as immunogenic and/or antigenic epitopes as described elsewhere herein.

[0213] Alternatively, preferred polypeptides of the present invention may comprise polypeptide sequences corresponding to, for example, internal regions of the C1NH (SNP_ID: AE105s6) polypeptide (e.g., any combination of both N- and C- terminal C1NH (SNP_ID: AE105s6) polypeptide deletions) of SEQ ID NO:30. For example, internal regions could be defined by the equation: amino acid NX to amino acid CX, wherein NX refers to any N-terminal deletion polypeptide amino acid of C1NH (SNP_ID: AE105s6) (SEQ ID NO:30), and where CX refers to any C-terminal deletion polypeptide amino acid of C1NH (SNP_ID: AE105s6) (SEQ ID NO:30). Polynucleotides encoding these polypeptides are also provided. The present invention also encompasses the use of these polypeptides as an immunogenic and/or antigenic epitope as described elsewhere herein. Preferably, the resulting deletion polypeptide comprises the polypeptide polymorphic loci identified elsewhere herein for C1NH (SNP_ID: AE105s6), and more preferably comprises the polypeptide polymorphic allele identified elsewhere herein for CINH (SNP_ID: AE105s6).

[0214] Features of the Polypeptide Encoded by Gene No:11

[0215] The present invention relates to isolated nucleic acid molecules comprising, or alternatively, consisting of all or a portion of the variant allele of the human kallikrein 1 gene (e.g., wherein reference or wildtype kallikrein 1 gene is exemplified by SEQ ID NO:31). Preferred portions are at least 10, preferably at least 20, preferably at least 40, preferably at least 100, contiguous polynucleotides and comprise a “G” at the nucleotide position corresponding to nucleotide 592 of the kallikrein 1 gene, or a portion of SEQ ID NO:33. Alternatively, preferred portions are at least 10, preferably at least 20, preferably at least 40, preferably at least 100, contiguous polynucleotides and comprise an “A” at the nucleotide position corresponding to nucleotide 592 of the kallikrein 1 gene, or a portion of SEQ ID NO:33. The invention further relates to isolated gene products, e.g., polypeptides and/or proteins, which are encoded by a nucleic acid molecule comprising all or a portion of the variant allele of the kallikrein 1 gene.

[0216] In one embodiment, the invention relates to a method for predicting the likelihood that an individual will have a disorder associated with a “G” at the nucleotide position corresponding to nucleotide position 592 of SEQ ID NO:33 (or diagnosing or aiding in the diagnosis of such a disorder) comprising the steps of obtaining a DNA sample from an individual to be assessed and determining the nucleotide present at position 592 of SEQ ID NO:33. The presence of a “G” at this position indicates that the individual has a greater likelihood of having a disorder associated therewith than an individual having a “A” at that position, or a greater likelihood of having more severe symptoms.

[0217] Conversely, the invention relates to a method for predicting the likelihood that an individual will have a disorder associated with a “A” at the nucleotide position corresponding to nucleotide position 592 of SEQ ID NO:33 (or diagnosing or aiding in the diagnosis of such a disorder) comprising the steps of obtaining a DNA sample from an individual to be assessed and determining the nucleotide present at position 592 of SEQ ID NO:33. The presence of a “A” at this position indicates that the individual has a greater likelihood of having a disorder associated therewith than an individual having a “G” at that position, or a greater likelihood of having more severe symptoms.

[0218] The present invention further relates to isolated proteins or polypeptides comprising, or alternatively, consisting of all or a portion of the encoded variant amino acid sequence of the human kallikrein 1 polypeptide (e.g., wherein reference or wildtype kallikrein 1 polypeptide is exemplified by SEQ ID NO:32). Preferred portions are at least 10, preferably at least 20, preferably at least 40, preferably at least 100, contiguous polypeptides and comprises an “E” at the amino acid position corresponding to amino acid 145 of the kallikrein 1 polypeptide, or a portion of SEQ ID NO:34. Alternatively, preferred portions are at least 10, preferably at least 20, preferably at least 40, preferably at least 100, contiguous polypeptides and comprises a “K” at the amino acid position corresponding to amino acid 145 of the kallikrein 1 protein, or a portion of SEQ ID NO:34. The invention further relates to isolated nucleic acid molecules encoding such polypeptides or proteins, as well as to antibodies that bind to such proteins or polypeptides.

[0219] Representative disorders which may be detected, diagnosed, identified, treated, prevented, and/or ameliorated by the present invention include, the following, non-limiting diseases and disorders: angioedema, cardiovascular diseases, angina pectoris, hypertension, heart failure, myocardial infarction, ventricular hypertrophy, cough associated with ACE inhibitors, cough associated with vasopeptidase inhibitors, vascular diseases, miscrovascular disease, vascular leak syndrome, aneurysm, stroke, embolism, thrombosis, endothelial dysfunction, coronary artery disease, arteriosclerosis, and/or atherosclerosis.

[0220] Additional disorders which may be detected, diagnosed, identified, treated, prevented, and/or ameliorated by the present invention include, the following, non-limiting diseases and disorders: hypotensive reactions during blood transfusions (Transfusion. 1999 Oct;39(10):1084-8.), hypersensitivity reactions during hemodialysis (Peptides. 1999;20(4):421-30.), sepsis, inflammatory arthritis, and enterocolitis (Clin Rev Allergy Immunol. 1998 Winter;16(4):365-84.), enterocolitis (Gut. 1998 Sep;43(3):365-74.), chronic granulomatous intestinal and systemic inflammation (FASEB J. 1998 Mar;12(3):325-33.), peptidoglycan-induced arthritis (Arthritis Rheum. 1997 Jul;40(7):1327-33.), arthritis (Proc Assoc Am Physicians. 1997 Jan;109(1):10-22.), intestinal inflammation (Dig Dis Sci. 1996 May;41(5):912-20.), acute phase response of inflammation (Peptides. 1996; 17(7): 1163-70.), asthma (J Appl Physiol 1995; 78: 1844-1852), chronic obstructive pulmonary disease (COPD), cough reflex, allergies, and/or neurogenic inflammation.

[0221] In preferred embodiments, the following N-terminal KLK1 (SNP_ID: 107s1) deletion polypeptides are encompassed by the present invention: M1-S262, W2-S262, F3-S262, L4-S262, V5-S262, L6-S262, C7-S262, L8-S262, A9-S262, L10-S262, S 11-S262, L12-S262, G13-S262, G14-S262, T15-S262, G16-S262, A17-S262, A18-S262, P19-S262, P20-S262, I21-S262, Q22-S262, S23-S262, R24-S262, I25-S262, V26-S262, G27-S262, G28-S262, W29-S262, E30-S262, C31-S262, E32-S262, Q33-S262, H34-S262, S35-S262, Q36-S262, P37-S262, W38-S262, Q39-S262, A40-S262, A41-S262, L42-S262, Y43-S262, H44-S262, F45-S262, S46-S262, T47-S262, F48-S262, Q49-S262, C50-S262, G51-S262, G52-S262, 153-S262, L54-S262, V55-S262, H56-S262, R57-S262, Q58-S262, W59-S262, V60-S262, L61-S262, T62-S262, A63-S262, A64-S262, H65-S262, C66-S262, I67-S262, S68-S262, D69-S262, N70-S262, Y71-S262, Q72-S262, L73-S262, W74-S262, L75-S262, G76-S262, R77-S262, H78-S262, N79-S262, L80-S262, F81-S262, D82-S262, D83-S262, E84-S262, N85-S262, T86-S262, A87-S262, Q88-S262, F89-S262, V90-S262, H91-S262, V92-S262, S93-S262, E94-S262, S95-S262, F96-S262, P97-S262, H98-S262, P99-S262, G100-S262, F101-S262, N102-S262, M103-S262, S104-S262, L105-S262, L106-S262, E107-S262, N108-S262, H109-S262, T110-S262, R111-S262, Q112-S262, A113-S262, D114-S262, E115-S262, D116-S262, Y117-S262, S118-S262, H119-S262, D120-S262, L121-S262, M122-S262, L123-S262, L124-S262, R125-S262, L126-S262, T127-S262, E128-S262, P129-S262, A130-S262, D131-S262, T132-S262, I133-S262, T134-S262, D135-S262, A136-S262, V137-S262, K138-S262, V139-S262, V140-S262, E141-S262, L142-S262, P143-S262, T144-S262, E145-S262, E146-S262, P147-S262, E148-S262, V149-S262, G150-S262, S151-S262, T152-S262, C153-S262, L154-S262, A155-S262, S156-S262, G157-S262, W158-S262, G159-S262, S160-S262, I161-S262, E162-S262, P163-S262, E164-S262, N165-S262, F166-S262, S167-S262, F168-S262, P169-S262, D170-S262, D171-S262, L172-S262, Q173-S262, C174-S262, V175-S262, D176-S262, L177-S262, K178-S262, I179-S262, L180-S262, P181-S262, N182-S262, D183-S262, E184-S262, C185-S262, E186-S262, K187-S262, A188-S262, H189-S262, V190-S262, Q191-S262, K192-S262, V193-S262, T194-S262, D195-S262, F196-S262, M197-S262, L198-S262, C199-S262, V200-S262, G201-S262, H202-S262, L203-S262, E204-S262, G205-S262, G206-S262, K207-S262, D208-S262, T209-S262, C210-S262, V211-S262, G212-S262, D213-S262, S214-S262, G215-S262, G216-S262, P217-S262, L218-S262, M219-S262, C220-S262, D221-S262, G222-S262, V223-S262, L224-S262, Q225-S262, G226-S262, V227-S262, T228-S262, S229-S262, W230-S262, G231-S262, Y232-S262, V233-S262, P234-S262, C235-S262, G236-S262, T237-S262, P238-S262, N239-S262, K240-S262, P241-S262, S242-S262, V243-S262, A244-S262, V245-S262, R246-S262, V247-S262, L248-S262, S249-S262, Y250-S262, V251-S262, K252-S262, W253-S262, I254-S262, E255-S262, and/or D256-S262 of SEQ ID NO:34. Polynucleotide sequences encoding these polypeptides are also provided. The present invention also encompasses the use of these N-terminal KLK1 (SNP_ID: 107s1) deletion polypeptides as immunogenic and/or antigenic epitopes as described elsewhere herein.

[0222] In preferred embodiments, the following C-terminal KLK1 (SNP_ID: 107s1) deletion polypeptides are encompassed by the present invention: M1-S262, M1-N261, M1-E260, M1-A259, M1-258, M1-T257, M1-D256, M1-E255, M1-I254, M1-W253, M1-K252, M1-V251, M1-Y250, M1-S249, M1-L248, M1-V247, M1-R246, M1-V245, M1-A244, M1-V243, M1-S242, M1-P241, M1-K240, M1-N239, M1-P238, M1-T237, M1-G236, M1-C235, M1-P234, M1-V233, M1-Y232, M1-G231, M1-W230, M1-S229, M1-T228, M1-V227, M1-G226, M1-Q225, M1-L224, M1-V223, M1-G222, M1-D221, M1-C220, M1-M219, M1-L218, M1-P217, M1-G216, M1-G215, M1-S214, M1-D213, M1-G212, M1-V211, M1-C210, M1-T209, M1-D208, M1-K207, M1-G206, M1-G205, M1-E204, M1-L203, M1-H202, M1-G201, M1-V200, M1-Cl99, M1-L198, M1-M197, M1-F196, M1-D195, M1-T194, M1-V193, M1-K192, M1-Q191, M1-V190, M1-H189, M1-A188, M1-K187, M1-E186, M1-C185, M1-E184, M1-D183, M1-N182, M1-P181, M1-L180, M1-I179, M1-K178, M1-L177, M1-D176, M1-V175, M1-C174, M1-Q173, M1-L172, M1-D171, M1-D170, M1-P169, M1-F168, M1-S167, M1-F166, M1-N165, M1-E164, M1-P163, M1-E162, M1-I161, M1-S160, M1-G159, M1-W158, M1-G157, M1-S156, M1-A155, M1-L154, M1-C153, M1-T152, M1-S151, M1-G150, M1-V149, M1-E148, M1-P147, M1-E146, M1-E145, M1-T144, M1-P143, M1-L142, M1-E141, M1-V140, M1-V139, M1-K138, M1-V137, M1-A136, M1-D135, M1-T134, M1-I133, M1-T132, M1-D131, M1-A130, M1-P129, M1-E128, M1-T127, M1-L126, M1-R125, M1-L124, M1-L123, M1-M122, M1-L121, M1-D120, M1-H119, M1-S118, M1-Y117, M1-D116, M1-E115, M1-D114, M1-A113, M1-Q112, M1-R111, M1-T110, M1-H109, M1-N108, M1-E107, M1-L106, M1-L105, M1-S104, M1-M103, M1-N102, M1-F101, M1-G100, M1-P99, M1-H98, M1-P97, M1-F96, M1-S95, M1-E94, M1-S93, M1-V92, M1-H91, M1-V90, M1-F89, M1-Q88, M1-A87, M1-T86, M1-N85, M1-E84, M1-D83, M1-D82, M1-F81, M1-L80, M1-N79, M1-H78, M1-R77, M1-G76, M1-L75, M1-W74, M1-L73, M1-Q72, M1-Y71, M1-N70, M1-D69, M1-S68, M1-167, M1-C66, M1-H65, M1-A64, M1-A63, M1-T62, M1-L61, M1-V60, M1-W59, M1-Q58, M1-R57, M1-H56, M1-V55, M1-L54, M1-153, M1-G52, M1-G51, M1-C50, M1-Q49, M1-F48, M1-T47, M1-S46, M1-F45, M1-H44, M1-Y43, M1-L42, M1-A41, M1-A40, M1-Q39, M1-W38, M1-P37, M1-Q36, M1-S35, M1-H34, M1-Q33, M1-E32, M1-C31, M1-E30, M1-W29, M1-G28, M1-G27, M1-V26, M1-125, M1-R24, M1-S23, M1-Q22, M1-121, M1-P20, M1-P19, M1-A18, M1-A17, M1-G16, M1-T15, M1-G14, M1-G13, M1-L12, M1-S11, M1-L10, M1-A9, M1-L8, and/or M1-C7 of SEQ ID NO:34. Polynucleotide sequences encoding these polypeptides are also provided. The present invention also encompasses the use of these C-terminal KLK1 (SNP_ID: 107s1) deletion polypeptides as immunogenic and/or antigenic epitopes as described elsewhere herein.

[0223] Alternatively, preferred polypeptides of the present invention may comprise polypeptide sequences corresponding to, for example, internal regions of the KLK1 (SNP_ID: AE107s1) polypeptide (e.g., any combination of both N- and C- terminal KLK1 (SNP_ID: AE107s1) polypeptide deletions) of SEQ ID NO:34. For example, internal regions could be defined by the equation: amino acid NX to amino acid CX, wherein NX refers to any N-terminal deletion polypeptide amino acid of KLK1 (SNP_ID: AE107s1) (SEQ ID NO:34), and where CX refers to any C-terminal deletion polypeptide amino acid of KLK1 (SNP_ID: AE107s1) (SEQ ID NO:34). Polynucleotides encoding these polypeptides are also provided. The present invention also encompasses the use of these polypeptides as an immunogenic and/or antigenic epitope as described elsewhere herein. Preferably, the resulting deletion polypeptide comprises the polypeptide polymorphic loci identified elsewhere herein for KLK1 (SNP_ID: AE107s1), and more preferably comprises the polypeptide polymorphic allele identified elsewhere herein for KLK1 (SNP_ID: AE107s1).

[0224] Features of the Polypeptide Encoded by Gene No: 12

[0225] The present invention relates to isolated nucleic acid molecules comprising, or alternatively, consisting of all or a portion of the variant allele of the human kallikrein 1 gene (e.g., wherein reference or wildtype kallikrein 1 gene is exemplified by SEQ ID NO:31). Preferred portions are at least 10, preferably at least 20, preferably at least 40, preferably at least 100, contiguous polynucleotides and comprise a “C” at the nucleotide position corresponding to nucleotide 469 of the kallikrein 1 gene, or a portion of SEQ ID NO:35. Alternatively, preferred portions are at least 10, preferably at least 20, preferably at least 40, preferably at least 100, contiguous polynucleotides and comprise a “G” at the nucleotide position corresponding to nucleotide 469 of the kallikrein I gene, or a portion of SEQ ID NO:35. The invention further relates to isolated gene products, e.g., polypeptides and/or proteins, which are encoded by a nucleic acid molecule comprising all or a portion of the variant allele of the kallikrein 1 gene.

[0226] In one embodiment, the invention relates to a method for predicting the likelihood that an individual will have a disorder associated with a “C” at the nucleotide position corresponding to nucleotide position 469 of SEQ ID NO:35 (or diagnosing or aiding in the diagnosis of such a disorder) comprising the steps of obtaining a DNA sample from an individual to be assessed and determining the nucleotide present at position 469 of SEQ ID NO:35. The presence of a “C” at this position indicates that the individual has a greater likelihood of having a disorder associated therewith than an individual having a “G” at that position, or a greater likelihood of having more severe symptoms.

[0227] Conversely, the invention relates to a method for predicting the likelihood that an individual will have a disorder associated with a “G” at the nucleotide position corresponding to nucleotide position 469 of SEQ ID NO:35 (or diagnosing or aiding in the diagnosis of such a disorder) comprising the steps of obtaining a DNA sample from an individual to be assessed and determining the nucleotide present at position 469 of SEQ ID NO:35. The presence of a “G” at this position indicates that the individual has a greater likelihood of having a disorder associated therewith than an individual having a “C” at that position, or a greater likelihood of having more severe symptoms.

[0228] The present invention further relates to isolated proteins or polypeptides comprising, or alternatively, consisting of all or a portion of the encoded variant amino acid sequence of the human kallikrein 1 polypeptide (e.g., wherein reference or wildtype kallikrein 1 polypeptide is exemplified by SEQ ID NO:32). Preferred portions are at least 10, preferably at least 20, preferably at least 40, preferably at least 100, contiguous polypeptides and comprises a “Q” at the amino acid position corresponding to amino acid 186 of the kallikrein 1 polypeptide, or a portion of SEQ ID NO:36. Alternatively, preferred portions are at least 10, preferably at least 20, preferably at least 40, preferably at least 100, contiguous polypeptides and comprises a “E” at the amino acid position corresponding to amino acid 186 of the kallikrein 1 protein, or a portion of SEQ ID NO:36. The invention further relates to isolated nucleic acid molecules encoding such polypeptides or proteins, as well as to antibodies that bind to such proteins or polypeptides.

[0229] Representative disorders which may be detected, diagnosed, identified, treated, prevented, and/or ameliorated by the present invention include, the following, non-limiting diseases and disorders: angioedema, cardiovascular diseases, angina pectoris, hypertension, heart failure, myocardial infarction, ventricular hypertrophy, cough associated with ACE inhibitors, cough associated with vasopeptidase inhibitors, vascular diseases, miscrovascular disease, vascular leak syndrome, aneurysm, stroke, embolism, thrombosis, endothelial dysfunction, coronary artery disease, arteriosclerosis, and/or atherosclerosis.

[0230] Additional disorders which may be detected, diagnosed, identified, treated, prevented, and/or ameliorated by the present invention include, the following, non-limiting diseases and disorders: hypotensive reactions during blood transfusions (Transfusion. 1999 Oct;39(10):1084-8.), hypersensitivity reactions during hemodialysis (Peptides. 1999;20(4):421-30.), sepsis, inflammatory arthritis, and enterocolitis (Clin Rev Allergy Immunol. 1998 Winter;16(4):365-84.), enterocolitis (Gut. 1998 Sep;43(3):365-74.), chronic granulomatous intestinal and systemic inflammation (FASEB J. 1998 Mar;12(3):325-33.), peptidoglycan-induced arthritis (Arthritis Rheum. 1997 Jul;40(7):1327-33.), arthritis (Proc Assoc Am Physicians. 1997 Jan;109(l):10-22.), intestinal inflammation (Dig Dis Sci. 1996 May;41(5):912-20.), acute phase response of inflammation (Peptides. 1996; 17(7): 1163-70.), asthma (J Appl Physiol 1995; 78: 1844-1852), chronic obstructive pulmonary disease (COPD), cough reflex, allergies, and/or neurogenic inflammation. In preferred embodiments, the following N-terminal KLK1 (SNP_ID: AE107s3) deletion polypeptides are encompassed by the present invention: M1-S262, W2-S262, F3-S262, L4-S262, V5-S262, L6-S262, C7-S262, L8-S262, A9-S262, L10-S262, S11-S262, L12-S262, G13-S262, G14-S262, T15-S262, G16-S262, A17-S262, A18-S262, P19-S262, P20-S262, I21-S262, Q22-S262, S23-S262, R24-S262, I25-S262, V26-S262, G27-S262, G28-S262, W29-S262, E30-S262, C31-S262, E32-S262, Q33-S262, H34-S262, S35-S262, Q36-S262, P37-S262, W38-S262, Q39-S262, A40-S262, A41-S262, L42-S262, Y43-S262, H44-S262, F45-S262, S46-S262, T47-S262, F48-S262, Q49-S262, C50-S262, G51-S262, G52-S262, 153-S262, L54-S262, V55-S262, H56-S262, R57-S262, Q58-S262, W59-S262, V60-S262, L61-S262, T62-S262, A63-S262, A64-S262, H65-S262, C66-S262, 167-S262, S68-S262, D69-S262, N70-S262, Y71-S262, Q72-S262, L73-S262, W74-S262, L75-S262, G76-S262, R77-S262, H78-S262, N79-S262, L80-S262, F81-S262, D82-S262, D83-S262, E84-S262, N85-S262, T86-S262, A87-S262, Q88-S262, F89-S262, V90-S262, H91-S262, V92-S262, S93-S262, E94-S262, S95-S262, F96-S262, P97-S262, H98-S262, P99-S262, G100-S262, F110-S262, N102-S262, M103-S262, S104-S262, L105-S262, L106-S262, E107-S262, N108-S262, H109-S262, T110-S262, R111-S262, Q112-S262, A113-S262, D114-S262, E115-S262, D116-S262, Y117-S262, S118-S262, H119-S262, D120-S262, L121-S262, M122-S262, L123-S262, L124-S262, R125-S262, L126-S262, T127-S262, E128-S262, P129-S262, A130-S262, D131-S262, T132-S262, I133-S262, T134-S262, D135-S262, A136-S262, V137-S262, K138-S262, V139-S262, V140-S262, E141-S262, L142-S262, P143-S262, T144-S262, Q145-S262, E146-S262, P147-S262, E148-S262, V149-S262, G150-S262, S151-S262, T152-S262, C153-S262, L154-S262, A155-S262, S156-S262, G157-S262, W158-S262, G159-S262, S160-S262, 1161-S262, E162-S262, P163-S262, E164-S262, N165-S262, F166-S262, S167-S262, F168-S262, P169-S262, D170-S262, D171-S262, L172-S262, Q173-S262, C174-S262, V175-S262, D176-S262, L177-S262, K178-S262, I179-S262, L180-S262, P181-S262, N182-S262, D183-S262, E184-S262, C185-S262, K186-S262, K187-S262, A188-S262, H189-S262, V190-S262, Q191-S262, K192-S262, V193-S262, T194-S262, D195-S262, F196-S262, M197-S262, L198-S262, C199-S262, V200-S262, G201-S262, H202-S262, L203-S262, E204-S262, G205-S262, G206-S262, K207-S262, D208-S262, T209-S262, C210-S262, V211-S262, G212-S262, D213-S262, S214-S262, G215-S262, G216-S262, P217-S262, L218-S262, M219-S262, C220-S262, D221-S262, G222-S262, V223-S262, L224-S262, Q225-S262, G226-S262, V227-S262, T228-S262, S229-S262, W230-S262, G231-S262, Y232-S262, V233-S262, P234-S262, C235-S262, G236-S262, T237-S262, P238-S262, N239-S262, K240-S262, P241-S262, S242-S262, V243-S262, A244-S262, V245-S262, R246-S262, V247-S262, L248-S262, S249-S262, Y250-S262, V251-S262, K252-S262, W253-S262, I254-S262, E255-S262, and/or D256-S262 of SEQ ID NO:36. Polynucleotide sequences encoding these polypeptides are also provided. The present invention also encompasses the use of these N-terminal KLK1 (SNP_ID: AE107s3) deletion polypeptides as immunogenic and/or antigenic epitopes as described elsewhere herein.

[0231] In preferred embodiments, the following C-terminal KLK1 (SNP_ID: AE107s3) deletion polypeptides are encompassed by the present invention: M1-S262, M1-N261, M1-E260, M1-A259, M1-I258, M1-T257, M1-D256, M1-E255, M1-I254, M1-W253, M1-K252, M1-V251, M1-Y250, M1-S249, M1-L248, M1-V247, M1-R246, M1-V245, M1-A244, M1-V243, M1-S242, M1-P241, M1-K240, M1-N239, M1-P238, M1-T237, M1-G236, M1-C235, M1-P234, M1-V233, M1-Y232, M1-G231, M1-W230, M1-S229, M1-T228, M1-V227, M1-G226, M1-Q225, M1-L224, M1-V223, M1-G222, M1-D221, M1-C220, M1-M219, M1-L218, M1-P217, M1-G216, M1-G215, M1-S214, M1-D213, M1-G212, M1-V211, M1-C210, M1-T209, M1-D208, M1-K207, M1-G206, M1-G205, M1-E204, M1-L203, M1-H202, M1-G201, M1-V200, M1-C199, M1-L198, M1-M197, M1-F196, M1-D195, M1-T194, M1-V193, M1-K192, M1-Q191, M1-V190, M1-H189, M1-A188, M1-K187, M1-K186, M1-C185, M1-E184, M1-D183, M1-N182, M1-P181, M1-L180, M1-I179, M1-K178, M1-L177, M1-D176, M1-V175, M1-C174, M1-Q173, M1-L172, M1-D171, M1-D170, M1-P169, M1-F168, M1-S167, M1-F166, M1-N165, M1-E164, M1-P163, M1-E162, M1-I161, M1-S160, M1-G159, M1-W158, M1-G157, M1-S156, M1-A155, M1-L154, M1-C153, M1-T152, M1-S151, M1-GI50, M1-V149, M1-E148, M1-P147, M1-E146, M1-Q145, M1-T144, M1-P143, M1-L142, M1-E141, M1-V140, M1-V139, M1-K138, M1-V137, M1-A136, M1-D135, M1-T134, M1-I133, M1-T132, M1-D131, M1-A130, M1-P129, M1-E128, M1-T127, M1-L126, M1-R125, M1-L124, M1-L123, M1-M122, M1-L121, M1-D120, M1-H119, M1-S118, M1-Y117, M1-D116, M1-E115, M1-D114, M1-A113, M1-Q112, M1-R111, M1-T110, M1-H109, M1-N108, M1-E107, M1-L106, M1-L105, M1-S104, M1-M103, M1-N102, M1-F101, M1-G100, M1-P99, M1-H98, M1-P97, M1-F96, M1-S95, M1-E94, M1-S93, M1-V92, M1-H91, M1-V90, M1-F89, M1-Q88, M1-A87, M1-T86, M1-N85, M1-E84, M1-D83, M1-D82, M1-F81, M1-L80, M1-N79, M1-H78, M1-R77, M1-G76, M1-L75, M1-W74, M1-L73, M1-Q72, M1-Y71, M1-N70, M1-D69, M1-S68, M1-167, M1-C66, M1-H65, M1-A64, M1-A63, M1-T62, M1-L61, M1-V60, M1-W59, M1-Q58, M1-R57, M1-H56, M1-V55, M1-L54, M1-153, M1-G52, M1-G51, M1-C50, M1-Q49, M1-F48, M1-T47, M1-S46, M1-F45, M1-H44, M1-Y43, M1-LA2, M1-A41, M1-A40, M1-Q39, M1-W38, M1-P37, M1-Q36, M1-S35, M1-H34, M1-Q33, M1-E32, M1-C31, M1-E30, M1-W29, M1-G28, M1-G27, M1-V26, M1-125, M1-R24, M1-S23, M1-Q22, M1-I21, M1-P20, M1-P19, M1-A18, M1-A17, M1-G16, M1-T15, M1-G14, M1-G13, M1-L12, M1-S11, M1-L10, M1-A9, M1-L8, and/or M1-C7 of SEQ ID NO:36. Polynucleotide sequences encoding these polypeptides are also provided. The present invention also encompasses the use of these C-terminal KLK1 (SNP_ID: AE107s3) deletion polypeptides as immunogenic and/or antigenic epitopes as described elsewhere herein.

[0232] Alternatively, preferred polypeptides of the present invention may comprise polypeptide sequences corresponding to, for example, internal regions of the KLK1 (SNP_ID: AE107s3) polypeptide (e.g., any combination of both N- and C- terminal KLKl (SNP_ID: AE107s3) polypeptide deletions) of SEQ ID NO:36. For example, internal regions could be defined by the equation: amino acid NX to amino acid CX, wherein NX refers to any N-terminal deletion polypeptide amino acid of KLK1 (SNP_ID: AE107s3) (SEQ ID NO:36), and where CX refers to any C-terminal deletion polypeptide amino acid of KLK1 (SNP_ID: AE107s3) (SEQ ID NO:36). Polynucleotides encoding these polypeptides are also provided. The present invention also encompasses the use of these polypeptides as an immunogenic and/or antigenic epitope as described elsewhere herein. Preferably, the resulting deletion polypeptide comprises the polypeptide polymorphic loci identified elsewhere herein for KLKl (SNP_ID: AE107s3), and more preferably comprises the polypeptide polymorphic allele identified elsewhere herein for KLK1 (SNP_ID: AE107s3).

[0233] Features of the Polypeptide Encoded by Gene No:13

[0234] The present invention relates to isolated nucleic acid molecules comprising, or alternatively, consisting of all or a portion of the variant allele of the human bradykinin receptor B1 gene (e.g., wherein reference or wildtype bradykinin receptor Bl gene is exemplified by SEQ ID NO:5). Preferred portions are at least 10, preferably at least 20, preferably at least 40, preferably at least 100, contiguous polynucleotides and comprise a “C” at the nucleotide position corresponding to nucleotide 348 of the bradykinin receptor B1 gene, or a portion of SEQ ID NO:555. Alternatively, preferred portions are at least 10, preferably at least 20, preferably at least 40, preferably at least 100, contiguous polynucleotides and comprise a “T” at the nucleotide position corresponding to nucleotide 348 of the bradykinin receptor B1 gene, or a portion of SEQ ID NO:555. The invention further relates to isolated gene products, e.g., polypeptides and/or proteins, which are encoded by a nucleic acid molecule comprising all or a portion of the variant allele of the bradykinin receptor B1 gene.

[0235] In one embodiment, the invention relates to a method for predicting the likelihood that an individual will have a disorder associated with a “C” at the nucleotide position corresponding to nucleotide position 348 of SEQ ID NO:555 (or diagnosing or aiding in the diagnosis of such a disorder) comprising the steps of obtaining a DNA sample from an individual to be assessed and determining the nucleotide present at position 348 of SEQ ID NO:555. The presence of a “C” at this position indicates that the individual has a greater likelihood of having a disorder associated therewith than an individual having a “T” at that position, or a greater likelihood of having more severe symptoms.

[0236] Conversely, the invention relates to a method for predicting the likelihood that an individual will have a disorder associated with a “T” at the nucleotide position corresponding to nucleotide position 348 of SEQ ID NO:555 (or diagnosing or aiding in the diagnosis of such a disorder) comprising the steps of obtaining a DNA sample from an individual to be assessed and determining the nucleotide present at position 348 of SEQ ID NO:555. The presence of a “T” at this position indicates that the individual has a greater likelihood of having a disorder associated therewith than an individual having a “C” at that position, or a greater likelihood of having more severe symptoms.

[0237] Representative disorders which may be detected, diagnosed, identified, treated, prevented, and/or ameliorated by the present invention include, the following, non-limiting diseases and disorders: angioedema, cardiovascular diseases, angina pectoris, hypertension, heart failure, myocardial infarction, ventricular hypertrophy, cough associated with ACE inhibitors, cough associated with vasopeptidase inhibitors, vascular diseases, miscrovascular disease, vascular leak syndrome, aneurysm, stroke, embolism, thrombosis, endothelial dysfunction, coronary artery disease, arteriosclerosis, and/or atherosclerosis.

[0238] Additional disorders which may be detected, diagnosed, identified, treated, prevented, and/or ameliorated by the present invention include, the following, non-limiting diseases and disorders: hypotensive reactions during blood transfusions (Transfusion. 1999 Oct;39(10):1084-8.), hypersensitivity reactions during hemodialysis (Peptides. 1999;20(4):421-30.), sepsis, inflammatory arthritis, and enterocolitis (Clin Rev Allergy Immunol. 1998 Winter; 16(4):365-84.), enterocolitis (Gut. 1998 Sep;43(3):365-74.), chronic granulomatous intestinal and systemic inflammation (FASEB J. 1998 Mar;12(3):325-33.), peptidoglycan-induced arthritis (Arthritis Rheum. 1997 Jul;40(7):1327-33.), arthritis (Proc Assoc Am Physicians. 1997 Jan;109(l):10-22.), intestinal inflammation (Dig Dis Sci. 1996 May;41(5):912-20.), acute phase response of inflammation (Peptides. 1996;17(7): 1163-70.), asthma (J Appl Physiol 1995; 78: 1844-1852), chronic obstructive pulmonary disease (COPD), cough reflex, allergies, and/or neurogenic inflammation.

[0239] Features of the Polypeptide Encoded by Gene No: 14

[0240] The present invention relates to isolated nucleic acid molecules comprising, or alternatively, consisting of all or a portion of the variant allele of the human bradykinin receptor B1 gene (e.g., wherein reference or wildtype bradykinin receptor B1 gene is exemplified by SEQ ID NO:5). Preferred portions are at least 10, preferably at least 20, preferably at least 40, preferably at least 100, contiguous polynucleotides and comprise an “A” at the nucleotide position corresponding to nucleotide 462 of the bradykinin receptor B1 gene, or a portion of SEQ ID NO:557. Alternatively, preferred portions are at least 10, preferably at least 20, preferably at least 40, preferably at least 100, contiguous polynucleotides and comprise a “G” at the nucleotide position corresponding to nucleotide 462 of the bradykinin receptor B1 gene, or a portion of SEQ ID NO:557. The invention further relates to isolated gene products, e.g., polypeptides and/or proteins, which are encoded by a nucleic acid molecule comprising all or a portion of the variant allele of the bradykinin receptor B1 gene.

[0241] In one embodiment, the invention relates to a method for predicting the likelihood that an individual will have a disorder associated with a “A” at the nucleotide position corresponding to nucleotide position 462 of SEQ ID NO:557 (or diagnosing or aiding in the diagnosis of such a disorder) comprising the steps of obtaining a DNA sample from an individual to be assessed and determining the nucleotide present at position 462 of SEQ ID NO:557. The presence of a “A” at this position indicates that the individual has a greater likelihood of having a disorder associated therewith than an individual having a “G” at that position, or a greater likelihood of having more severe symptoms.

[0242] Conversely, the invention relates to a method for predicting the likelihood that an individual will have a disorder associated with a “G” at the nucleotide position corresponding to nucleotide position 462 of SEQ ID NO:557 (or diagnosing or aiding in the diagnosis of such a disorder) comprising the steps of obtaining a DNA sample from an individual to be assessed and determining the nucleotide present at position 462 of SEQ ID NO:557. The presence of a “G” at this position indicates that the individual has a greater likelihood of having a disorder associated therewith than an individual having a “A” at that position, or a greater likelihood of having more severe symptoms.

[0243] Representative disorders which may be detected, diagnosed, identified, treated, prevented, and/or ameliorated by the present invention include, the following, non-limiting diseases and disorders: angioedema, cardiovascular diseases, angina pectoris, hypertension, heart failure, myocardial infarction, ventricular hypertrophy, cough associated with ACE inhibitors, cough associated with vasopeptidase inhibitors, vascular diseases, miscrovascular disease, vascular leak syndrome, aneurysm, stroke, embolism, thrombosis, endothelial dysfunction, coronary artery disease, arteriosclerosis, and/or atherosclerosis.

[0244] Additional disorders which may be detected, diagnosed, identified, treated, prevented, and/or ameliorated by the present invention include, the following, non-limiting diseases and disorders: hypotensive reactions during blood transfusions (Transfusion. 1999 Oct;39(10): 1084-8.), hypersensitivity reactions during hemodialysis (Peptides. 1999;20(4):421-30.), sepsis, inflammatory arthritis, and enterocolitis (Clin Rev Allergy Immunol. 1998 Winter;16(4):365-84.), enterocolitis (Gut. 1998 Sep;43(3):365-74.), chronic granulomatous intestinal and systemic inflammation (FASEB J. 1998 Mar;12(3):325-33.), peptidoglycan-induced arthritis (Arthritis Rheum. 1997 Jul;40(7):1327-33.), arthritis (Proc Assoc Am Physicians. 1997 Jan;109(1):10-22.), intestinal inflammation (Dig Dis Sci. 1996 May;41(5):912-20.), acute phase response of inflammation (Peptides. 1996; 17(7): 1163-70.), asthma (J Appl Physiol 1995; 78: 1844-1852), chronic obstructive pulmonary disease (COPD), cough reflex, allergies, and/or neurogenic inflammation.

[0245] Features of the Polypeptide Encoded by Gene No:15

[0246] The present invention relates to isolated nucleic acid molecules comprising, or alternatively, consisting of all or a portion of the variant allele of the human bradykinin receptor B1 gene (e.g., wherein reference or wildtype bradykinin receptor B1 gene is exemplified by SEQ ID NO:5). Preferred portions are at least 10, preferably at least 20, preferably at least 40, preferably at least 100, contiguous polynucleotides and comprise a “G” at the nucleotide position corresponding to nucleotide 577 of the bradykinin receptor B1 gene, or a portion of SEQ ID NO:559. Alternatively, preferred portions are at least 10, preferably at least 20, preferably at least 40, preferably at least 100, contiguous polynucleotides and comprise a “C” at the nucleotide position corresponding to nucleotide 577 of the bradykinin receptor B1 gene, or a portion of SEQ ID NO:559. The invention further relates to isolated gene products, e.g., polypeptides and/or proteins, which are encoded by a nucleic acid molecule comprising all or a portion of the variant allele of the bradykinin receptor B1 gene.

[0247] In one embodiment, the invention relates to a method for predicting the likelihood that an individual will have a disorder associated with a “G” at the nucleotide position corresponding to nucleotide position 577 of SEQ ID NO:559 (or diagnosing or aiding in the diagnosis of such a disorder) comprising the steps of obtaining a DNA sample from an individual to be assessed and determining the nucleotide present at position 577 of SEQ ID NO:559. The presence of a “G” at this position indicates that the individual has a greater likelihood of having a disorder associated therewith than an individual having a “C” at that position, or a greater likelihood of having more severe symptoms.

[0248] Conversely, the invention relates to a method for predicting the likelihood that an individual will have a disorder associated with a “C” at the nucleotide position corresponding to nucleotide position 577 of SEQ ID NO:559 (or diagnosing or aiding in the diagnosis of such a disorder) comprising the steps of obtaining a DNA sample from an individual to be assessed and determining the nucleotide present at position 577 of SEQ ID NO:559. The presence of a “C” at this position indicates that the individual has a greater likelihood of having a disorder associated therewith than an individual having a “G” at that position, or a greater likelihood of having more severe symptoms.

[0249] The present invention further relates to isolated proteins or polypeptides comprising, or alternatively, consisting of all or a portion of the encoded variant amino acid sequence of the human bradykinin receptor B1 polypeptide (e.g., wherein reference or wildtype bradykinin receptor B1 polypeptide is exemplified by SEQ ID NO:6). Preferred portions are at least 10, preferably at least 20, preferably at least 40, preferably at least 100, contiguous polypeptides and comprises a “V” at the amino acid position corresponding to amino acid 191 of the bradykinin receptor B1 polypeptide, or a portion of SEQ ID NO:560. Alternatively, preferred portions are at least 10, preferably at least 20, preferably at least 40, preferably at least 100, contiguous polypeptides and comprises a “L” at the amino acid position corresponding to amino acid 191 of the bradykinin receptor B1 protein, or a portion of SEQ ID NO:560. The invention further relates to isolated nucleic acid molecules encoding such polypeptides or proteins, as well as to antibodies that bind to such proteins or polypeptides.

[0250] Representative disorders which may be detected, diagnosed, identified, treated, prevented, and/or ameliorated by the present invention include, the following, non-limiting diseases and disorders: angioedema, cardiovascular diseases, angina pectoris, hypertension, heart failure, myocardial infarction, ventricular hypertrophy, cough associated with ACE inhibitors, cough associated with vasopeptidase inhibitors, vascular diseases, miscrovascular disease, vascular leak syndrome, aneurysm, stroke, embolism, thrombosis, endothelial dysfunction, coronary artery disease, arteriosclerosis, and/or atherosclerosis.

[0251] Additional disorders which may be detected, diagnosed, identified, treated, prevented, and/or ameliorated by the present invention include, the following, non-limiting diseases and disorders: hypotensive reactions during blood transfusions (Transfusion. 1999 Oct;39(10):1084-8.), hypersensitivity reactions during hemodialysis (Peptides. 1999;20(4):421-30.), sepsis, inflammatory arthritis, and enterocolitis (Clin Rev Allergy Immunol. 1998 Winter;16(4):365-84.), enterocolitis (Gut. 1998 Sep;43(3):365-74.), chronic granulomatous intestinal and systemic inflammation (FASEB J. 1998 Mar;12(3):325-33.), peptidoglycan-induced arthritis (Arthritis Rheum. 1997 Jul;40(7):1327-33.), arthritis (Proc Assoc Am Physicians. 1997 Jan;109(1):10-22.), intestinal inflammation (Dig Dis Sci. 1996 May;41(5):912-20.), acute phase response of inflammation (Peptides. 1996; 17(7): 1163-70.), asthma (J Appl Physiol 1995; 78: 1844-1852), chronic obstructive pulmonary disease (COPD), cough reflex, allergies, and/or neurogenic inflammation.

[0252] In preferred embodiments, the following N-terminal BDKRB1 (SNP_ID: AE103s8) deletion polypeptides are encompassed by the present invention: M1-N353, A2-N353, S3-N353, S4-N353, W5-N353, P6-N353, P7-N353, L8-N353, E9-N353, L10-N353, Q11-N353, S12-N353, S13-N353, N14-N353, Q15-N353, S16-N353, Q17-N353, L18-N353, F19-N353, P20-N353, Q21-N353, N22-N353, A23-N353, T24-N353, A25-N353, C26-N353, D27-N353, N28-N353, A29-N353, P30-N353, E31-N353, A32-N353, W33-N353, D34-N353, L35-N353, L36-N353, H37-N353, R38-N353, V39-N353, L40-N353, P41-N353, T42-N353, F43-N353, I44-N353, I45-N353, S46-N353, 147-N353, C48-N353, F49-N353, F50-N353, G51-N353, L52-N353, L53-N353, G54-N353, N55-N353, L56-N353, F57-N353, V58-N353, L59-N353, L60-N353, V61-N353, F62-N353, L63-N353, L64-N353, P65-N353, R66-N353, R67-N353, Q68-N353, L69-N353, N70-N353, V71-N353, A72-N353, E73-N353, I74-N353, Y75-N353, L76-N353, A77-N353, N78-N353, L79-N353, A80-N353, A81-N353, S82-N353, D83-N353, L84-N353, V85-N353, F86-N353, V87-N353, L88-N353, G89-N353, L90-N353, P91-N353, F92-N353, W93-N353, A94-N353, E95-N353, N96-N353, 197-N353, W98-N353, N99-N353, Q100-N353, F101-N353, N102-N353, W103-N353, P104-N353, F105-N353, G106-N353, A107-N353, L108-N353, L109-N353, C110-N353, R111-N353, V112-N353, I113-N353, N114-N353, G115-N353, V116-N353, I117-N353, K118-N353, A119-N353, N120-N353, L121-N353, F122-N353, I123-N353, S124-N353, I125-N353, F126-N353, L127-N353, V128-N353, V129-N353, A130-N353, I131-N353, S132-N353, Q133-N353, D134-N353, R135-N353, Y136-N353, R137-N353, V138-N353, L139-N353, V140-N353, H141-N353, P142-N353, M143-N353, A144-N353, S145-N353, G146-N353, R147-N353, Q148-N353, Q149-N353, R150-N353, R151-N353, R152-N353, Q153-N353, A154-N353, R155-N353, V156-N353, T157-N353, C158-N353, V159-N353, L160-N353, I161-N353, W162-N353, V163-N353, V164-N353, G165-N353, G166-N353, L167-N353, L168-N353, S169-N353, I170-N353, P171-N353, T172-N353, F173-N353, L174-N353, L175-N353, R176-N353, S177-N353, I178-N353, Q179-N353, A180-N353, V181-N353, P182-N353, D183-N353, L184-N353, N185-N353, I186-N353, T187-N353, A188-N353, C189-N353, I190-N353, V191-N353, L192-N353, L193-N353, P194-N353, H195-N353, E196-N353, A197-N353, W198-N353, H199-N353, F200-N353, A201-N353, R202-N353, 1203-N353, V204-N353, E205-N353, L206-N353, N207-N353, 1208-N353, L209-N353, G210-N353, F211-N353, L212-N353, L213-N353, P214-N353, L215-N353, A216-N353, A217-N353, I218-N353, V219-N353, F220-N353, F221-N353, N222-N353, Y223-N353, H224-N353, I225-N353, L226-N353, A227-N353, S228-N353, L229-N353, R230-N353, T231-N353, R232-N353, E233-N353, E234-N353, V235-N353, S236-N353, R237-N353, T238-N353, R239-N353, V240-N353, R241-N353, G242-N353, P243-N353, K244-N353, D245-N353, S246-N353, K247-N353, T248-N353, T249-N353, A250-N353, L251-N353, 1252-N353, L253-N353, T254-N353, L255-N353, V256-N353, V257-N353, A258-N353, F259-N353, L260-N353, V261-N353, C262-N353, W263-N353, A264-N353, P265-N353, Y266-N353, H267-N353, F268-N353, F269-N353, A270-N353, F271-N353, L272-N353, E273-N353, F274-N353, L275-N353, F276-N353, Q277-N353, V278-N353, Q279-N353, A280-N353, V281-N353, R282-N353, G283-N353, C284-N353, F285-N353, W286-N353, E287-N353, D288-N353, F289-N353, I290-N353, D291-N353, L292-N353, G293-N353, L294-N353, Q295-N353, L296-N353, A297-N353, N298-N353, F299-N353, F300-N353, A301-N353, F302-N353, T303-N353, N304-N353, S305-N353, S306-N353, L307-N353, N308-N353, P309-N353, V310-N353, I311-N353, Y312-N353, V313-N353, F314-N353, V315-N353, G316-N353, R317-N353, L318-N353, F319-N353, R320-N353, T321-N353, K322-N353, V323-N353, W324-N353, E325-N353, L326-N353, Y327-N353, K328-N353, Q329-N353, C330-N353, T331-N353, P332-N353, K333-N353, S334-N353, L335-N353, A336-N353, P337-N353, I338-N353, S339-N353, S340-N353, S341-N353, H342-N353, R343-N353, K344-N353, E345-N353, 1346-N353, and/or F347-N353 of SEQ ID NO:560. Polynucleotide sequences encoding these polypeptides are also provided. The present invention also encompasses the use of these N-terminal BDKRB1 (SNP_ID: AE103s8) deletion polypeptides as immunogenic and/or antigenic epitopes as described elsewhere herein.

[0253] In preferred embodiments, the following C-terminal BDKRB1 (SNP_ID: AE103s8) deletion polypeptides are encompassed by the present invention: M1-N353, M1-R352, M1-W351, M1-F350, M1-L349, M1-Q348, M1-F347, M1-I346, M1-E345, M1-K344, M1-R343, M1-H342, M1-S341, M1-S340, M1-S339, M1-I338, M1-P337, M1-A336, M1-L335, M1-S334, M1-K333, M1-P332, M1-T331, M1-C330, M1-Q329, M1-K328, M1-Y327, M1-L326, M1-E325, M1-W324, M1-V323, M1-K322, M1-T321, M1-R320, M1-F319, M1-L318, M1-R317, M1-G316, M1-V315, M1-F314, M1-V313, M1-Y312, M1-I311, M1-V310, M1-P309, M1-N308, M1-L307, M1-S306, M1-S305, M1-N304, M1-T303, M1-F302, M1-A301, M1-F300, M1-F299, M1-N298, M1-A297, M1-L296, M1-Q295, M1-L294, M1-G293, M1-L292, M1-D291, M1-I290, M1-F289, M1-D288, M1-E287, M1-W286, M1-F285, M1-C284, M1-G283, M1-R282, M1-V281, M1-A280, M1-Q279, M1-V278, M1-Q277, M1-F276, M1-L275, M1-F274, M1-E273, M1-L272, M1-F271, M1-A270, M1-F269, M1-F268, M1-H267, M1-Y266, M1-P265, M1-A264, M1-W263, M1-C262, M1-V261, M1-L260, M1-F259, M1-A258, M1-V257, M1-V256, M1-L255, M1-T254, M1-L253, M1-1252, M1-L251, M1-A250, M1-T249, M1-T248, M-K247, M1-S246, M1-D245, M1-K244, M1-P243, M1-G242, M1-R241, M1-V240, M1-R239, M1-T238, M1-R237, M1-S236, M1-V235, M1-E234, M1-E233, M1-R232, M1-T231, M1-R230, M1-L229, M1-S228, M1-A227, M1-L226, M1-I225, M1-H224, M1-Y223, M1-N222, M1-F221, M1-F220, M1-V219, M1-I218, M1-A217, M1-A216, M1-L215, M1-P214, M1-L213, M1-L212, M1-F211, M1-G210, M1-L209, M1-1208, M1-N207, M1-L206, M1-E205, M1-V204, M1-1203, M1-R202, M1-A201, M1-F200, M1-H199, M1-W198, M1-A197, M1-E196, M1-H195, M1-P194, M1-L193, M1-L192, M1-V191, M1-I190, M1-C189, M1-A188, M1-T187, M1-I186, M1-N185, M1-L184, M1-D183, M1-P182, M1-V181, M1-A180, M1-Q179, M1-I178, M1-S177, M1-R176, M1-L175, M1-L174, M1-F173, M1-T172, M1-P171, M1-I170, M1-S169, M1-L168, M1-L167, M1-G166, M1-G165, M1-V164, M1-V163, M1-W162, M1-1161, M1-L160, M1-V159, M1-C158, M1-T157, M1-V156, M1-R155, M1-A154, M1-Q153, M1-R152, M1-R151, M1-R150, M1-Q149, M1-Q148, M1-R147, M1-G146, M1-S145, M1-A144, M1-M143, M1-P142, M1-H141, M1-V140, M1-L139, M1-V138, M1-R137, M1-Y136, M1-R135, M1-D134, M1-Q133, M1-S132, M1-I131, M1-A130, M1-V129, M1-V128, M1-L127, M1-F126, M1-I125, M1-S124, M1-I123, M1-F122, M1-L121, M1-N120, M1-A119, M1-K118, M1-I117, M1-V116, M1-G115, M1-N114, M1-I113, M1-V112, M1-R111, M1-C110, M1-L109, M1-L108, M1-A107, M1-G106, M1-F105, M1-P104, M1-W103, M1-N102, M1-F110, M1-Q110, M1-N99, M1-W98, M1-197, M1-N96, M1-E95, M1-A94, M1-W93, M1-F92, M1-P91, M1-L90, M1-G89, M1-L88, M1-V87, M1-F86, M1-V85, M1-L84, M1-D83, M1-S82, M1-A81, M1-A80, M1-L79, M1-N78, M1-A77, M1-L76, M1-Y75, M1-174, M1-E73, M1-A72, M1-V71, M1-N70, M1-L69, M1-Q68, M1-R67, M1-R66, M1-P65, M1-L64, M1-L63, M1-F62, M1-V61, M1-L60, M1-L59, M1-V58, M1-F57, M1-L56, M1-N55, M1-G54, M1-L53, M1-L52, M1-G51, M1-F50, M1-F49, M1-C48, M1-147, M1-S46, M1-145, M1-144, M1-F43, M1-T42, M1-P41, M1-L40, M1-V39, M1-R38, M1-H37, M1-L36, M1-L35, M1-D34, M1-W33, M1-A32, M1-E31, M1-P30, M1-A29, M1-N28, M1-D27, M1-C26, M1-A25, M1-T24, M1-A23, M1-N22, M1-Q21, M1-P20, M1-F19, M1-L18, M1-Q17, M1-S16, M1-Q15, M1-N14, M1-S13, M1-S12, M1-Q11, M1-L10, M1-E9, M1-L8, and/or M1-P7 of SEQ ID NO:560. Polynucleotide sequences encoding these polypeptides are also provided. The present invention also encompasses the use of these C-terminal BDKRB1 (SNP_ID: AE103s8) deletion polypeptides as immunogenic and/or antigenic epitopes as described elsewhere herein.

[0254] Alternatively, preferred polypeptides of the present invention may comprise polypeptide sequences corresponding to, for example, internal regions of the BDKRB1 (SNP_ID: AE103s8) polypeptide (e.g., any combination of both N- and C-terminal BDKRB1 (SNP_ID: AE103s8) polypeptide deletions) of SEQ ID NO:560. For example, internal regions could be defined by the equation: amino acid NX to amino acid CX, wherein NX refers to any N-terminal deletion polypeptide amino acid of BDKRB1 (SNP_ID: AE103s8) (SEQ ID NO:560), and where CX refers to any C-terminal deletion polypeptide amino acid of BDKRB1 (SNP_ID: AE103s8) (SEQ ID NO:560). Polynucleotides encoding these polypeptides are also provided. The present invention also encompasses the use of these polypeptides as an immunogenic and/or antigenic epitope as described elsewhere herein. Preferably, the resulting deletion polypeptide comprises the polypeptide polymorphic loci identified elsewhere herein for BDKRB1 (SNP_ID: AE103s8), and more preferably comprises the polypeptide polymorphic allele identified elsewhere herein for BDKRB1 (SNP_ID: AE103s8).

[0255] Features of the Polypeptide Encoded by Gene No:16

[0256] The present invention relates to isolated nucleic acid molecules comprising, or alternatively, consisting of all or a portion of the variant allele of the human bradykinin receptor B1 gene (e.g., wherein reference or wildtype bradykinin receptor B1 gene is exemplified by SEQ ID NO:5). Preferred portions are at least 10, preferably at least 20, preferably at least 40, preferably at least 100, contiguous polynucleotides and comprise an “A” at the nucleotide position corresponding to nucleotide 706 of the bradykinin receptor B1 gene, or a portion of SEQ ID NO:561. Alternatively, preferred portions are at least 10, preferably at least 20, preferably at least 40, preferably at least 100, contiguous polynucleotides and comprise a “G” at the nucleotide position corresponding to nucleotide 706 of the bradykinin receptor B1 gene, or a portion of SEQ ID NO:561. The invention further relates to isolated gene products, e.g., polypeptides and/or proteins, which are encoded by a nucleic acid molecule comprising all or a portion of the variant allele of the bradykinin receptor B1 gene.

[0257] In one embodiment, the invention relates to a method for predicting the likelihood that an individual will have a disorder associated with a “A” at the nucleotide position corresponding to nucleotide position 706 of SEQ ID NO:561 (or diagnosing or aiding in the diagnosis of such a disorder) comprising the steps of obtaining a DNA sample from an individual to be assessed and determining the nucleotide present at position 706 of SEQ ID NO:561. The presence of a “A” at this position indicates that the individual has a greater likelihood of having a disorder associated therewith than an individual having a “G” at that position, or a greater likelihood of having more severe symptoms.

[0258] Conversely, the invention relates to a method for predicting the likelihood that an individual will have a disorder associated with a “G” at the nucleotide position corresponding to nucleotide position 706 of SEQ ID NO:561 (or diagnosing or aiding in the diagnosis of such a disorder) comprising the steps of obtaining a DNA sample from an individual to be assessed and determining the nucleotide present at position 706 of SEQ ID NO:561. The presence of a “G” at this position indicates that the individual has a greater likelihood of having a disorder associated therewith than an individual having a “A” at that position, or a greater likelihood of having more severe symptoms.

[0259] The present invention further relates to isolated proteins or polypeptides comprising, or alternatively, consisting of all or a portion of the encoded variant amino acid sequence of the human bradykinin receptor B1 polypeptide (e.g., wherein reference or wildtype bradykinin receptor B1 polypeptide is exemplified by SEQ ID NO:6). Preferred portions are at least 10, preferably at least 20, preferably at least 40, preferably at least 100, contiguous polypeptides and comprises a “K” at the amino acid position corresponding to amino acid 233 of the bradykinin receptor B1 polypeptide, or a portion of SEQ ID NO:562. Alternatively, preferred portions are at least 10, preferably at least 20, preferably at least 40, preferably at least 100, contiguous polypeptides and comprises a “E” at the amino acid position corresponding to amino acid 233 of the bradykinin receptor B1 protein, or a portion of SEQ ID NO:262. The invention further relates to isolated nucleic acid molecules encoding such polypeptides or proteins, as well as to antibodies that bind to such proteins or polypeptides.

[0260] Representative disorders which may be detected, diagnosed, identified, treated, prevented, and/or ameliorated by the present invention include, the following, non-limiting diseases and disorders: angioedema, cardiovascular diseases, angina pectoris, hypertension, heart failure, myocardial infarction, ventricular hypertrophy, cough associated with ACE inhibitors, cough associated with vasopeptidase inhibitors, vascular diseases, miscrovascular disease, vascular leak syndrome, aneurysm, stroke, embolism, thrombosis, endothelial dysfunction, coronary artery disease, arteriosclerosis, and/or atherosclerosis.

[0261] Additional disorders which may be detected, diagnosed, identified, treated, prevented, and/or ameliorated by the present invention include, the following, non-limiting diseases and disorders: hypotensive reactions during blood transfusions (Transfusion. 1999 Oct;39(10): 1084-8.), hypersensitivity reactions during hemodialysis (Peptides. 1999;20(4):421-30.), sepsis, inflammatory arthritis, and enterocolitis (Clin Rev Allergy Immunol. 1998 Winter;16(4):365-84.), enterocolitis (Gut. 1998 Sep;43(3):365-74.), chronic granulomatous intestinal and systemic inflammation (FASEB J. 1998 Mar;12(3):325-33.), peptidoglycan-induced arthritis (Arthritis Rheum. 1997 Jul;40(7):1327-33.), arthritis (Proc Assoc Am Physicians. 1997 Jan;109(1):10-22.), intestinal inflammation (Dig Dis Sci. 1996 May;41(5):912-20.), acute phase response of inflammation (Peptides. 1996; 17(7): 1163-70.), asthma (J Appl Physiol 1995; 78: 1844-1852), chronic obstructive pulmonary disease (COPD), cough reflex, allergies, and/or neurogenic inflammation.

[0262] In preferred embodiments, the following N-terminal BDKRB1 (SNP_ID: AE103s9) deletion polypeptides are encompassed by the present invention: M1-N353, A2-N353, S3-N353, S4-N353, W5-N353, P6-N353, P7-N353, L8-N353, E9-N353, L10-N353, Q11-N353, S12-N353, S13-N353, N14-N353, Q15-N353, S16-N353, Q17-N353, L18-N353, F19-N353, P20-N353, Q21-N353, N22-N353, A23-N353, T24-N353, A25-N353, C26-N353, D27-N353, N28-N353, A29-N353, P30-N353, E31-N353, A32-N353, W33-N353, D34-N353, L35-N353, L36-N353, H37-N353, R38-N353, V39-N353, L40-N353, P41-N353, T42-N353, F43-N353, 144-N353, I45-N353, S46-N353, 147-N353, C48-N353, F49-N353, F50-N353, G51-N353, L52-N353, L53-N353, G54-N353, N55-N353, L56-N353, F57-N353, V58-N353, L59-N353, L60-N353, V61-N353, F62-N353, L63-N353, L64-N353, P65-N353, R66-N353, R67-N353, Q68-N353, L69-N353, N70-N353, V71-N353, A72-N353, E73-N353, I74-N353, Y75-N353, L76-N353, A77-N353, N78-N353, L79-N353, A80-N353, A81-N353, S82-N353, D83-N353, L84-N353, V85-N353, F86-N353, V87-N353, L88-N353, G89-N353, L90-N353, P91-N353, F92-N353, W93-N353, A94-N353, E95-N353, N96-N353, I97-N353, W98-N353, N99-N353, Q100-N353, F101-to N353, N102-N353, W103-N353, P104-N353, F105-N353, G106-N353, A107-N353, L108-N353, L109-N353, C110-N353, R111-N353, V112-N353, I113-N353, N114-N353, G115-N353, V116-N353, I117-N353, K118-N353, Al19-N353, N120-N353, L121-N353, F122-N353, I123-N353, S124-N353, I125-N353, F126-N353, L127-N353, V128-N353, V129-N353, A130-N353, I131-N353, S132-N353, Q133-N353, D134-N353, R135-N353, Y136-N353, R137-N353, V138-N353, L139-N353, V140-N353, H141-N353, P142-N353, M143-N353, A144-N353, S145-N353, G146-N353, R147-N353, Q148-N353, Q149-N353, R150-N353, R151-N353, R152-N353, Q153-N353, A154-N353, R155-N353, V156-N353, T157-N353, C158-N353, V159-N353, L160-N353, 1161-N353, W162-N353, V163-N353, V164-N353, G165-N353, G166-N353, L167-N353, L168-N353, S169-N353, I170-N353, P171-N353, T172-N353, F173-N353, L174-N353, L175-N353, R176-N353, S177-N353, I178-N353, Q179-N353, A180-N353, V181-N353, P182-N353, D183-N353, L184-N353, N185-N353, I186-N353, T187-N353, A188-N353, C189-N353, I190-N353, L191-N353, L192-N353, L193-N353, P194-N353, H195-N353, E196-N353, A197-N353, W198-N353, H199-N353, F200-N353, A201-N353, R202-N353, 1203-N353, V204-N353, E205-N353, L206-N353, N207-N353, I208-N353, L209-N353, G210-N353, F211-N353, L212-N353, L213-N353, P214-N353, L215-N353, A216-N353, A217-N353, I218-N353, V219-N353, F220-N353, F221-N353, N222-N353, Y223-N353, H224-N353, I225-N353, L226-N353, A227-N353, S228-N353, L229-N353, R230-N353, T231-N353, R232-N353, K233-N353, E234-N353, V235-N353, S236-N353, R237-N353, T238-N353, R239-N353, V240-N353, R241-N353, G242-N353, P243-N353, K244-N353, D245-N353, S246-N353, K247-N353, T248-N353, T249-N353, A250-N353, L251-N353, 1252-N353, L253-N353, T254-N353, L255-N353, V256-N353, V257-N353, A258-N353, F259-N353, L260-N353, V261-N353, C262-N353, W263-N353, A264-N353, P265-N353, Y266-N353, H267-N353, F268-N353, F269-N353, A270-N353, F271-N353, L272-N353, E273-N353, F274-N353, L275-N353, F276-N353, Q277-N353, V278-N353, Q279-N353, A280-N353, V281-N353, R282-N353, G283-N353, C284-N353, F285-N353, W286-N353, E287-N353, D288-N353, F289-N353, I290-N353, D291-N353, L292-N353, G293-N353, L294-N353, Q295-N353, L296-N353, A297-N353, N298-N353, F299-N353, F300-N353, A301-N353, F302-N353, T303-N353, N304-N353, S305-N353, S306-N353, L307-N353, N308-N353, P309-N353, V310-N353, I311-N353, Y312-N353, V313-N353, F314-N353, V315-N353, G316-N353, R317-N353, L318-N353, F319-N353, R320-N353, T321-N353, K322-N353, V323-N353, W324-N353, E325-N353, L326-N353, Y327-N353, K328-N353, Q329-N353, C330-N353, T331-N353, P332-N353, K333-N353, S334-N353, L335-N353, A336-N353, P337-N353, I338-N353, S339-N353, S340-N353, S341-N353, H342-N353, R343-N353, K344-N353, E345-N353, I346-N353, and/or F347-N353 of SEQ ID NO:562. Polynucleotide sequences encoding these polypeptides are also provided. The present invention also encompasses the use of these N-terminal BDKRB1 (SNP_ID: AE103s9) deletion polypeptides as immunogenic and/or antigenic epitopes as described elsewhere herein.

[0263] In preferred embodiments, the following C-terminal BDKRB1 (SNP_ID: AE103s9) deletion polypeptides are encompassed by the present invention: M1-N353, M1-R352, M1-W351, M1-F350, M1-L349, M1-Q348, M1-F347, M1-1346, M1-E345, M1-K344, M1-R343, M1-H342, M1-S341, M1-S340, M1-S339, M1-I338, M1-P337, M1-A336, M1-L335, M1-S334, M1-K333, M1-P332, M1-T331, M1-C330, M1-Q329, M1-K328, M1-Y327, M1-L326, M1-E325, M1-W324, M1-V323, M1-K322, M1-T321, M1-R320, M1-F319, M1-L318, M1-R317, M1-G316, M1-V315, M1-F314, M1-V313, M1-Y312, M1-I311, M1-V310, M1-P309, M1-N308, M1-L307, M1-S306, M1-S305, M1-N304, M1-T303, M1-F302, M1-A301, M1-F300, M1-F299, M1-N298, M1-A297, M1-L296, M1-Q295, M1-L294, M1-G293, M1-L292, M1-D291, M1-I290, M1-F289, M1-D288, M1-E287, M1-W286, M1-F285, M1-C284, M1-G283, M1-R282, M1-V281, M1-A280, M1-Q279, M1-V278, M1-Q277, M1-F276, M1-L275, M1-F274, M1-E273, M1-L272, M1-F271, M1-A270, M1-F269, M1-F268, M1-H267, M1-Y266, M1-P265, M1-A264, M1-W263, M1-C262, M1-V261, M1-L260, M1-F259, M1-A258, M1-V257, M1-V256, M1-L255, M1-T254, M1-L253, M1-I252, M1-L251, M1-A250, M1-T249, M1-T248, M1-K247, M1-S246, M1-D245, M1-K244, M1-P243, M1-G242, M1-R241, M1-V240, M1-R239, M1-T238, M1-R237, M1-S236, M1-V235, M1-E234, M1-K233, M1-R232, M1-T231, M1-R230, M1-L229, M1-S228, M1-A227, M1-L226, M1-I225, M1-H224, M1-Y223, M1-N222, M1-F221, M1-F220, M1-V219, M1-I218, M1-A217, M1-A216, M1-L215, M1-P214, M1-L213, M1-L212, M1-F211, M1-G210, M1-L209, M1-I208, M1-N207, M1-L206, M1-E205, M1-V204, M1-1203, M1-R202, M1-A201, M1-F200, M1-H199, M1-W198, M1-A197, M1-E196, M1-H195, M1-P194, M1-L193, M1-L192, M1-L191, M1-I190, M1-C189, M1-A188, M1-T187, M1-I186, M1-N185, M1-L184, M1-D183, M1-P182, M1-V181, M1-A180, M1-Q179, M1-I178, M1-S177, M1-R176, M1-L175, M1-L174, M1-F173, M1-T172, M1-P171, M1-I170, M1-S169, M1-L168, M1-L167, M1-G166, M1-G165, M1-V164, M1-V163, M1-W162, M1-I161, M1-L160, M1-V159, M1-C158, M1-T157, M1-V156, M1-R155, M1-A154, M1-Q153, M1-R152, M1-R151, M1-R150, M1-Q149, M1-Q148, M1-R147, M1-G146, M1-S145, M1-A144, M1-M143, M1-P142, M1-H141, M1-V140, M1-L139, M1-V138, M1-R137, M1-Y136, M1-R135, M1-D134, M1-Q133, M1-S132, M1-I131, M1-A130, M1-V129, M1-V128, M1-L127, M1-F126, M1-I125, M1-S124, M1-I123, M1-F122, M1-L121, M1-N120, M1-A119, M1-K118, M1-I117, M1-V116, M1-G115, M1-N114, M1-I113, M1-V112, M1-R111, M1-C110, M1-L109, M1-L108, M1-A107, M1-G106, M1-F105, M1-P104, M1-W103, M1-N102, M1-F1I0, M1-Q100, M1-N99, M1-W98, M1-197, M1-N96, M1-E95, M1-A94, M1-W93, M1-F92, M1-P91, M1-L90, M1-G89, M1-L88, M1-V87, M1-F86, M1-V85, M1-L84, M1-D83, M1-S82, M1-A81, M1-A80, M1-L79, M1-N78, M1-A77, M1-L76, M1-Y75, M1-174, M1-E73, M1-A72, M1-V71, M1-N70, M1-L69, M1-Q68, M1-R67, M1-R66, M1-P65, M1-L64, M1-L63, M1-F62, M1-V61, M1-L60, M1-L59, M1-V58, M1-F57, M1-L56, M1-N55, M1-G54, M1-L53, M1-L52, M1-G51, M1-F50, M1-F49, M1-C48, M1-147, M1-S46, M1-145, M1-144, M1-F43, M1-T42, M1-P41, M1-LO, M1-V39, M1-R38, M1-H37, M1-L36, M1-L35, M1-D34, M1-W33, M1-A32, M1-E31, M1-P30, M1-A29, M1-N28, M1-D27, M1-C26, M1-A25, M1-T24, M1-A23, M1-N22, M1-Q21, M1-P20, M1-F19, M1-L18, M1-Q17, M1-S16, M1-Q15, M1-N14, M1-S13, M1-S12, M1-Q11, M1-L10, M1-E9, M1-L8, and/or M1-P7 of SEQ ID NO:562. Polynucleotide sequences encoding these polypeptides are also provided. The present invention also encompasses the use of these C-terminal BDKRB1 (SNP_ID: AE103s9) deletion polypeptides as immunogenic and/or antigenic epitopes as described elsewhere herein.

[0264] Alternatively, preferred polypeptides of the present invention may comprise polypeptide sequences corresponding to, for example, internal regions of the BDKRB1 (SNP_ID: AE103s9) polypeptide (e.g., any combination of both N- and C-terminal BDKRB1 (SNP_ID: AE103s9) polypeptide deletions) of SEQ ID NO:562. For example, internal regions could be defined by the equation: amino acid NX to amino acid CX, wherein NX refers to any N-terminal deletion polypeptide amino acid of BDKRB1 (SNP_ID: AE103s9) (SEQ ID NO:562), and where CX refers to any C-terminal deletion polypeptide amino acid of BDKRB1 (SNP_ID: AE103s9) (SEQ ID NO:562). Polynucleotides encoding these polypeptides are also provided. The present invention also encompasses the use of these polypeptides as an immunogenic and/or antigenic epitope as described elsewhere herein. Preferably, the resulting deletion polypeptide comprises the polypeptide polymorphic loci identified elsewhere herein for BDKRB1 (SNP_ID: AE103s9), and more preferably comprises the polypeptide polymorphic allele identified elsewhere herein for BDKRB1 (SNP_ID: AE103s9).

[0265] Features of the Polypeptide Encoded by Gene No: 17

[0266] The present invention relates to isolated nucleic acid molecules comprising, or alternatively, consisting of all or a portion of the variant allele of the human bradykinin receptor B2 gene (e.g., wherein reference or wildtype bradykinin receptor B2 gene is exemplified by SEQ ID NO:11). Preferred portions are at least 10, preferably at least 20, preferably at least 40, preferably at least 100, contiguous polynucleotides and comprise a “T” at the nucleotide position corresponding to nucleotide 40 of the bradykinin receptor B2 gene, or a portion of SEQ ID NO:563. Alternatively, preferred portions are at least 10, preferably at least 20, preferably at least 40, preferably at least 100, contiguous polynucleotides and comprise a “C” at the nucleotide position corresponding to nucleotide 40 of the bradykinin receptor B2 gene, or a portion of SEQ ID NO:563. The invention further relates to isolated gene products, e.g., polypeptides and/or proteins, which are encoded by a nucleic acid molecule comprising all or a portion of the variant allele of the bradykinin receptor B2 gene.

[0267] In one embodiment, the invention relates to a method for predicting the likelihood that an individual will have a disorder associated with a “T” at the nucleotide position corresponding to nucleotide position 40 of SEQ ID NO:563 (or diagnosing or aiding in the diagnosis of such a disorder) comprising the steps of obtaining a DNA sample from an individual to be assessed and determining the nucleotide present at position 40 of SEQ ID NO:563. The presence of a “T” at this position indicates that the individual has a greater likelihood of having a disorder associated therewith than an individual having a “C” at that position, or a greater likelihood of having more severe symptoms.

[0268] Conversely, the invention relates to a method for predicting the likelihood that an individual will have a disorder associated with a “C” at the nucleotide position corresponding to nucleotide position 40 of SEQ ID NO:563 (or diagnosing or aiding in the diagnosis of such a disorder) comprising the steps of obtaining a DNA sample from an individual to be assessed and determining the nucleotide present at position 40 of SEQ ID NO:563. The presence of a “C” at this position indicates that the individual has a greater likelihood of having a disorder associated therewith than an individual having a “T” at that position, or a greater likelihood of having more severe symptoms.

[0269] The present invention further relates to isolated proteins or polypeptides comprising, or alternatively, consisting of all or a portion of the encoded variant amino acid sequence of the human bradykinin receptor B2 polypeptide (e.g., wherein reference or wildtype bradykinin receptor B2 polypeptide is exemplified by SEQ ID NO:12). Preferred portions are at least 10, preferably at least 20, preferably at least 40, preferably at least 100, contiguous polypeptides and comprises a “C” at the amino acid position corresponding to amino acid 14 of the bradykinin receptor B2 polypeptide, or a portion of SEQ ID NO:564. Alternatively, preferred portions are at least 10, preferably at least 20, preferably at least 40, preferably at least 100, contiguous polypeptides and comprises a “R” at the amino acid position corresponding to amino acid 14 of the bradykinin receptor B2 protein, or a portion of SEQ ID NO:564. The invention further relates to isolated nucleic acid molecules encoding such polypeptides or proteins, as well as to antibodies that bind to such proteins or polypeptides.

[0270] Representative disorders which may be detected, diagnosed, identified, treated, prevented, and/or ameliorated by the present invention include, the following, non-limiting diseases and disorders: angioedema, cardiovascular diseases, angina pectoris, hypertension, heart failure, myocardial infarction, ventricular hypertrophy, cough associated with ACE inhibitors, cough associated with vasopeptidase inhibitors, vascular diseases, miscrovascular disease, vascular leak syndrome, aneurysm, stroke, embolism, thrombosis, endothelial dysfunction, coronary artery disease, arteriosclerosis, and/or atherosclerosis.

[0271] Additional disorders which may be detected, diagnosed, identified, treated, prevented, and/or ameliorated by the present invention include, the following, non-limiting diseases and disorders: hypotensive reactions during blood transfusions (Transfusion. 1999 Oct;39(10): 1084-8.), hypersensitivity reactions during hemodialysis (Peptides. 1999;20(4):421-30.), sepsis, inflammatory arthritis, and enterocolitis (Clin Rev Allergy Immunol. 1998 Winter;16(4):365-84.), enterocolitis (Gut. 1998 Sep;43(3):365-74.), chronic granulomatous intestinal and systemic inflammation (FASEB J. 1998 Mar;12(3):325-33.), peptidoglycan-induced arthritis (Arthritis Rheum. 1997 Jul;40(7):1327-33.), arthritis (Proc Assoc Am Physicians. 1997 Jan;109(1):10-22.), intestinal inflammation (Dig Dis Sci. 1996 May;41(5):912-20.), acute phase response of inflammation (Peptides. 1996; 17(7): 1163-70.), asthma (J Appl Physiol 1995; 78: 1844-1852), chronic obstructive pulmonary disease (COPD), cough reflex, allergies, and/or neurogenic inflammation.

[0272] In preferred embodiments, the following N-terminal BDKRB2 (SNP_ID: AE104s19) deletion polypeptides are encompassed by the present invention: M1-Q391, F2-Q391, S3-Q391, P4-Q391, W5-Q391, K6-Q391, 17-Q391, S8-Q391, M9-Q391, F10-Q391, L11-Q391, S12-Q391, V13-Q391, C14-Q391, E15-Q391, D16-Q391, S17-Q391, V18-Q391, P19-Q391, T20-Q391, T21-Q391, A22-Q391, S23-Q391, F24-Q391, S25-Q391, A26-Q391, D27-Q391, M28-Q391, L29-Q391, N30-Q391, V31-Q391, T32-Q391, L33-Q391, Q34-Q391, G35-Q391, P36-Q391, T37-Q391, L38-Q391, N39-Q391, G40-Q391, T41-Q391, F42-Q391, A43-Q391, Q44-Q391, S45-Q391, K46-Q391, C47-Q391, P48-Q391, Q49-Q391, V50-Q391, E51-Q391, W52-Q391, L53-Q391, G54-Q391, W55-Q391, L56-Q391, N57-Q391, T58-Q391, 159-Q391, Q60-Q391, P61-Q391, P62-Q391, F63-Q391, L64-Q391, W65-Q391, V66-Q391, L67-Q391, F68-Q391, V69-Q391, L70-Q391, A71-Q391, T72-Q391, L73-Q391, E74-Q391, N75-Q391, 176-Q391, F77-Q391, V78-Q391, L79-Q391, S80-Q391, V81-Q391, F82-Q391, C83-Q391, L84-Q391, H85-Q391, K86-Q391, S87-Q391, S88-Q391, C89-Q391, T90-Q391, V91-Q391, A92-Q391, E93-Q391, I94-Q391, Y95-Q391, L96-Q391, G97-Q391, N98-Q391, L99-Q391, A100-Q391, A101-Q391, A102-Q391, D103-Q391, L104-Q391, I105-Q391, L106-Q391, A107-Q391, C108-Q391, G109-Q391, L110-Q391, P111-Q391, F112-Q391, W113-Q391, A114-Q391, I115-Q391, T116-Q391, I117-Q391, S118-Q391, N119-Q391, N120-Q391, F121-Q391, D122-Q391, W123-Q391, L124-Q391, F125-Q391, G126-Q391, E127-Q391, T128-Q391, L129-Q391, C130-Q391, R131-Q391, V132-Q391, V133-Q391, N134-Q391, A135-Q391, I136-Q391, I137-Q391, S138-Q391, M139-Q391, N140-Q391, L141-Q391, Y142-Q391, S143-Q391, S144-Q391, I145-Q391, C146-Q391, F147-Q391, L148-Q391, M149-Q391, L150-Q391, V151-Q391, S152-Q391, I153-Q391, D154-Q391, R155-Q391, Y156-Q391, L157-Q391, A158-Q391, L159-Q391, V160-Q391, K161-Q391, T162-Q391, M163-Q391, S164-Q391, M165-Q391, G166-Q391, R167-Q391, M168-Q391, R169-Q391, G170-Q391, V171-Q391, R172-Q391, W173-Q391, A174-Q391, K175-Q391, L176-Q391, Y177-Q391, S178-Q391, L179-Q391, V180-Q391, I181-Q391, W182-Q391, G183-Q391, C184-Q391, T185-Q391, L186-Q391, L187-Q391, L188-Q391, S189-Q391, S190-Q391, P191-Q391, M192-Q391, L193-Q391, V194-Q391, F195-Q391, R196-Q391, T197-Q391, M198-Q391, K199-Q391, E200-Q391, Y201-Q391, S202-Q391, D203-Q391, E204-Q391, G205-Q391, H206-Q391, N207-Q391, V208-Q391, T209-Q391, A210-Q391, C211-Q391, V212-Q391, I213-Q391, S214-Q391, Y215-Q391, P216-Q391, S217-Q391, L218-Q391, I219-Q391, W220-Q391, E221-Q391, V222-Q391, F223-Q391, T224-Q391, N225-Q391, M226-Q391, L227-Q391, L228-Q391, N229-Q391, V230-Q391, V231-Q391, G232-Q391, F233-Q391, L234-Q391, L235-Q391, P236-Q391, L237-Q391, S238-Q391, V239-Q391, I240-Q391, T241-Q391, F242-Q391, C243-Q391, T244-Q391, M245-Q391, Q246-Q391, I247-Q391, M248-Q391, Q249-Q391, V250-Q391, L251-Q391, R252-Q391, N253-Q391, N254-Q391, E255-Q391, M256-Q391, Q257-Q391, K258-Q391, F259-Q391, K260-Q391, E261-Q391, I262-Q391, Q263-Q391, T264-Q391, E265-Q391, R266-Q391, R267-Q391, A268-Q391, T269-Q391, V270-Q391, L271-Q391, V272-Q391, L273-Q391, V274-Q391, V275-Q391, L276-Q391, L277-Q391, L278-Q391, F279-Q391, I280-Q391, I281-Q391, C282-Q391, W283-Q391, L284-Q391, P285-Q391, F286-Q391, Q287-Q391, I288-Q391, S289-Q391, T290-Q391, F291-Q391, L292-Q391, D293-Q391, T294-Q391, L295-Q391, H296-Q391, R297-Q391, L298-Q391, G299-Q391, I300-Q391, L301-Q391, S302-Q391, S303-Q391, C304-Q391, Q305-Q391, D306-Q391, E307-Q391, R308-Q391, I309-Q391, I310-Q391, D311-Q391, V312-Q391, I313-Q391, T314-Q391, Q315-Q391, I316-Q391, A317-Q391, S318-Q391, F319-Q391, M320-Q391, A321-Q391, Y322-Q391, S323-Q391, N324-Q391, S325-Q391, C326-Q391, L327-Q391, N328-Q391, P329-Q391, L330-Q391, V331-Q391, Y332-Q391, V333-Q391, I334-Q391, V335-Q391, G336-Q391, K337-Q391, R338-Q391, F339-Q391, R340-Q391, K341-Q391, K342-Q391, S343-Q391, W344-Q391, E345-Q391, V346-Q391, Y347-Q391, Q348-Q391, G349-Q391, V350-Q391, C351-Q391, Q352-Q391, K353-Q391, G354-Q391, G355-Q391, C356-Q391, R357-Q391, S358-Q391, E359-Q391, P360-Q391, I361-Q391, Q362-Q391, M363-Q391, E364-Q391, N365-Q391, S366-Q391, M367-Q391, G368-Q391, T369-Q391, L370-Q391, R371-Q391, T372-Q391, S373-Q391, I374-Q391, S375-Q391, V376-Q391, E377-Q391, R378-Q391, Q379-Q391, I380-Q391, H381-Q391, K382-Q391, L383-Q391, Q384-Q391, and/or D385-Q391 of SEQ ID NO:564. Polynucleotide sequences encoding these polypeptides are also provided. The present invention also encompasses the use of these N-terminal BDKRB2 (SNP_ID: AE104s19) deletion polypeptides as immunogenic and/or antigenic epitopes as described elsewhere herein.

[0273] In preferred embodiments, the following C-terminal BDKRB2 (SNP_ID: AE104s19) deletion polypeptides are encompassed by the present invention: M1-Q391, M1-R390, M1-S389, M1-G388, M1-A387, M1-W386, M1-D385, M1-Q384, M1-L383, M1-K382, M1-H381, M1-I380, M1-Q379, M1-R378, M1-E377, M1-V376, M1-S375, M1-I374, M1-S373, M1-T372, M1-R371, M1-L370, M1-T369, M1-G368, M1-M367, M1-S366, M1-N365, M1-E364, M1-M363, M1-Q362, M1-I361, M1-P360, M1-E359, M1-S358, M1-R357, M1-C356, M1-G355, M1-G354, M1-K353, M1-Q352, M1-C351, M1-V350, M1-G349, M1-Q348, M1-Y347, M1-V346, M1-E345, M1-W344, M1-S343, M1-K342, M1-K341, M1-R340, M1-F339, M1-R338, M1-K337, M1-G336, M1-V335, M1-I334, M1-V333, M1-Y332, M1-V331, M1-L330, M1-P329, M1-N328, M1-L327, M1-C326, M1-S325, M1-N324, M1-S323, M1-Y322, M1-A321, M1-M320, M1-F319, M1-S318, M1-A317, M1-I316, M1-Q315, M1-T314, M1-I313, M1-V312, M1-D311, M1-I310, M1-I309, M1-R308, M1-E307, M1-D306, M1-Q305, M1-C304, M1-S303, M1-S302, M1-L301, M1-I300, M1-G299, M1-L298, M1-R297, M1-H296, M1-L295, M1-T294, M1-D293, M1-L292, M1-F291, M1-T290, M1-S289, M1-I288, M1-Q287, M1-F286, M1-P285, M1-L284, M1-W283, M1-C282, M1-I281, M1-I280, M1-F279, M1-L278, M1-L277, M1-L276, M1-V275, M1-V274, M1-L273, M1-V272, M1-L271, M1-V270, M1-T269, M1-A268, M1-R267, M1-R266, M1-E265, M1-T264, M1-Q263, M1-I262, M1-E261, M1-K260, M1-F259, M1-K258, M1-Q257, M1-M256, M1-E255, M1-N254, M1-N253, M1-R252, M1-L251, M1-V250, M1-Q249, M1-M248, M1-I247, M1-Q246, M1-M245, M1-T244, M1-C243, M1-F242, M1-T241, M1-I240, M1-V239, M1-S238, M1-L237, M1-P236, M1-L235, M1-L234, M1-F233, M1-G232, M1-V231, M1-V230, M1-N229, M1-L228, M1-L227, M1-M226, M1-N225, M1-T224, M1-F223, M1-V222, M1-E221, M1-W220, M1-I219, M1-L218, M1-S217, M1-P216, M1-Y215, M1-S214, M1-I213, M1-V212, M1-C211, M1-A210, M1-T209, M1-V208, M1-N207, M1-H206, M1-G205, M1-E204, M1-D203, M1-S202, M1-Y201, M1-E200, M1-K199, M1-M198, M1-T197, M1-R196, M1-F195, M1-V194, M1-L193, M1-M192, M1-P191, M1-S190, M1-S189, M1-L188, M1-L187, M1-L186, M1-T185, M1-C184, M1-G183, M1-W182, M1-I181, M1-V180, M1-L179, M1-S178, M1-Y177, M1-L176, M1-K175, M1-A174, M1-W173, M1-R172, M1-V171, M1-G170, M1-R169, M1-M168, M1-R167, M1-G166, M1-M165, M1-S164, M1-M163, M1-T162, M1-K161, M1-V160, M1-L159, M1-A158, M1-L157, M1-Y156, M1-R155, M1-D154, M1-I153, M1-S152, M1-V151, M1-L150, M1-M149, M1-L148, M1-F147, M1-C146, M1-I145, M1-S144, M1-S143, M1-Y142, M1-L141, M1-N140, M1-M139, M1-S138, M1-I137, M1-I136, M1-A135, M1-N134, M1-V133, M1-V132, M1-R131, M1-C130, M1-L129, M1-T128, M1-E127, M1-G126, M1-F125, M1-L124, M1-W123, M1-D122, M1-F121, M1-N120, M1-N119, M1-S118, M1-I117, M1-T116, M1-I115, M1-A114, M1-W113, M1-F112, M1-P111, M1-L110, M1-G109, M1-C108, M1-A107, M1-L106, M1-I105, M1-L104, M1-D113, M1-A102, M1-A110, M1-A10, M1-L99, M1-N98, M1-G97, M1-L96, M1-Y95, M1-194, M1-E93, M1-A92, M1-V91, M1-T90, M1-C89, M1-S88, M1-S87, M1-K86, M1-H85, M1-L84, M1-C83, M1-F82, M1-V81, M1-S80, M1-L79, M1-V78, M1-F77, M1-176, M1-N75, M1-E74, M1-L73, M1-T72, M1-A71, M1-L70, M1-V69, M1-F68, M1-L67, M1-V66, M1-W65, M1-L64, M1-F63, M1-P62, M1-P61, M1-Q60, M1-159, M1-T58, M1-N57, M1-L56, M1-W55, M1-G54, M1-L53, M1-W52, M1-E51, M1-V50, M1-Q49, M1-P48, M1-C47, M1-K46, M1-S45, M1-Q44, M1-A43, M1-F42, M1-T41, M1-G40, M1-N39, M1-L38, M1-T37, M1-P36, M1-G35, M1-Q34, M1-L33, M1-T32, M1-V31, M1-N30, M1-L29, M1-M28, M1-D27, M1-A26, M1-S25, M1-F24, M1-S23, M1-A22, M1-T21, M1-T20, M1-P19, M1-V18, M1-S17, M1-D16, M1-E15, M1-C14, M1-V13, M1-S12, M1-L1, M1-F10, M1-M9, M1-S8, and/or M1-17 of SEQ ID NO:564. Polynucleotide sequences encoding these polypeptides are also provided. The present invention also encompasses the use of these C-terminal BDKRB2 (SNP_ID: AE104s19) deletion polypeptides as immunogenic and/or antigenic epitopes as described elsewhere herein.

[0274] Alternatively, preferred polypeptides of the present invention may comprise polypeptide sequences corresponding to, for example, internal regions of the BDKRB2 (SNP_ID: AE104s19) polypeptide (e.g., any combination of both N- and C-terminal BDKRB2 (SNP_ID: AE104s19) polypeptide deletions) of SEQ ID NO:564. For example, internal regions could be defined by the equation: amino acid NX to amino acid CX, wherein NX refers to any N-terminal deletion polypeptide amino acid of BDKRB2 (SNP_ID: AE104s19) (SEQ ID NO:564), and where CX refers to any C-terminal deletion polypeptide amino acid of BDKRB2 (SNP_ID: AE104s19) (SEQ ID NO:564). Polynucleotides encoding these polypeptides are also provided. The present invention also encompasses the use of these polypeptides as an immunogenic and/or antigenic epitope as described elsewhere herein. Preferably, the resulting deletion polypeptide comprises the polypeptide polymorphic loci identified elsewhere herein for BDKRB2 (SNP_ID: AE104s19), and more preferably comprises the polypeptide polymorphic allele identified elsewhere herein for BDKRB2 (SNP_ID: AE104s19).

[0275] Features of the Polypeptide Encoded by Gene No:18

[0276] The present invention relates to isolated nucleic acid molecules comprising, or alternatively, consisting of all or a portion of the variant allele of the human bradykinin receptor B2 gene (e.g., wherein reference or wildtype bradykinin receptor B2 gene is exemplified by SEQ ID NO:11). Preferred portions are at least 10, preferably at least 20, preferably at least 40, preferably at least 100, contiguous polynucleotides and comprise a “C” at the nucleotide position corresponding to nucleotide 933 of the bradykinin receptor B2 gene, or a portion of SEQ ID NO:565. Alternatively, preferred portions are at least 10, preferably at least 20, preferably at least 40, preferably at least 100, contiguous polynucleotides and comprise a “T” at the nucleotide position corresponding to nucleotide 933 of the bradykinin receptor B2 gene, or a portion of SEQ ID NO:565. The invention further relates to isolated gene products, e.g., polypeptides and/or proteins, which are encoded by a nucleic acid molecule comprising all or a portion of the variant allele of the bradykinin receptor B2 gene.

[0277] In one embodiment, the invention relates to a method for predicting the likelihood that an individual will have a disorder associated with a “C” at the nucleotide position corresponding to nucleotide position 933 of SEQ ID NO:565 (or diagnosing or aiding in the diagnosis of such a disorder) comprising the steps of obtaining a DNA sample from an individual to be assessed and determining the nucleotide present at position 933 of SEQ ID NO:565. The presence of a “C” at this position indicates that the individual has a greater likelihood of having a disorder associated therewith than an individual having a “T” at that position, or a greater likelihood of having more severe symptoms.

[0278] Conversely, the invention relates to a method for predicting the likelihood that an individual will have a disorder associated with a “T” at the nucleotide position corresponding to nucleotide position 933 of SEQ ID NO:565 (or diagnosing or aiding in the diagnosis of such a disorder) comprising the steps of obtaining a DNA sample from an individual to be assessed and determining the nucleotide present at position 933 of SEQ ID NO:565. The presence of a “T” at this position indicates that the individual has a greater likelihood of having a disorder associated therewith than an individual having a “C” at that position, or a greater likelihood of having more severe symptoms.

[0279] Representative disorders which may be detected, diagnosed, identified, treated, prevented, and/or ameliorated by the present invention include, the following, non-limiting diseases and disorders: angioedema, cardiovascular diseases, angina pectoris, hypertension, heart failure, myocardial infarction, ventricular hypertrophy, cough associated with ACE inhibitors, cough associated with vasopeptidase inhibitors, vascular diseases, miscrovascular disease, vascular leak syndrome, aneurysm, stroke, embolism, thrombosis, endothelial dysfunction, coronary artery disease, arteriosclerosis, and/or atherosclerosis.

[0280] Additional disorders which may be detected, diagnosed, identified, treated, prevented, and/or ameliorated by the present invention include, the following, non-limiting diseases and disorders: hypotensive reactions during blood transfusions (Transfusion. 1999 Oct;39(10):1084-8.), hypersensitivity reactions during hemodialysis (Peptides. 1999;20(4):421-30.), sepsis, inflammatory arthritis, and enterocolitis (Clin Rev Allergy Immunol. 1998 Winter;16(4):365-84.), enterocolitis (Gut. 1998 Sep;43(3):365-74.), chronic granulomatous intestinal and systemic inflammation (FASEB J. 1998 Mar;12(3):325-33.), peptidoglycan-induced arthritis (Arthritis Rheum. 1997 Jul;40(7):1327-33.), arthritis (Proc Assoc Am Physicians. 1997 Jan;109(1):10-22.), intestinal inflammation (Dig Dis Sci. 1996 May;41(5):912-20.), acute phase response of inflammation (Peptides. 1996;17(7): 1163-70.), asthma (J Appl Physiol 1995; 78: 1844-1852), chronic obstructive pulmonary disease (COPD), cough reflex, allergies, and/or neurogenic inflammation.

[0281] Features of the Polypeptide Encoded by Gene No:19

[0282] The present invention relates to isolated nucleic acid molecules comprising, or alternatively, consisting of all or a portion of the variant allele of the human bradykinin receptor B2 gene (e.g., wherein reference or wildtype bradykinin receptor B2 gene is exemplified by SEQ ID NO: 1). Preferred portions are at least 10, preferably at least 20, preferably at least 40, preferably at least 100, contiguous polynucleotides and comprise an “A” at the nucleotide position corresponding to nucleotide 1061 of the bradykinin receptor B2 gene, or a portion of SEQ ID NO:567. Alternatively, preferred portions are at least 10, preferably at least 20, preferably at least 40, preferably at least 100, contiguous polynucleotides and comprise a “G” at the nucleotide position corresponding to nucleotide 1061 of the bradykinin receptor B2 gene, or a portion of SEQ ID NO:567. The invention further relates to isolated gene products, e.g., polypeptides and/or proteins, which are encoded by a nucleic acid molecule comprising all or a portion of the variant allele of the bradykinin receptor B2 gene.

[0283] In one embodiment, the invention relates to a method for predicting the likelihood that an individual will have a disorder associated with a “A” at the nucleotide position corresponding to nucleotide position 1061 of SEQ ID NO:567 (or diagnosing or aiding in the diagnosis of such a disorder) comprising the steps of obtaining a DNA sample from an individual to be assessed and determining the nucleotide present at position 1061 of SEQ ID NO:567. The presence of a “A” at this position indicates that the individual has a greater likelihood of having a disorder associated therewith than an individual having a “G” at that position, or a greater likelihood of having more severe symptoms.

[0284] Conversely, the invention relates to a method for predicting the likelihood that an individual will have a disorder associated with a “G” at the nucleotide position corresponding to nucleotide position 1061 of SEQ ID NO:567 (or diagnosing or aiding in the diagnosis of such a disorder) comprising the steps of obtaining a DNA sample from an individual to be assessed and determining the nucleotide present at position 1061 of SEQ ID NO:567. The presence of a “G” at this position indicates that the individual has a greater likelihood of having a disorder associated therewith than an individual having a “A” at that position, or a greater likelihood of having more severe symptoms.

[0285] The present invention further relates to isolated proteins or polypeptides comprising, or alternatively, consisting of all or a portion of the encoded variant amino acid sequence of the human bradykinin receptor B2 polypeptide (e.g., wherein reference or wildtype bradykinin receptor B2 polypeptide is exemplified by SEQ ID NO:12). Preferred portions are at least 10, preferably at least 20, preferably at least 40, preferably at least 100, contiguous polypeptides and comprises an “E” at the amino acid position corresponding to amino acid 354 of the bradykinin receptor B2 polypeptide, or a portion of SEQ ID NO:568. Alternatively, preferred portions are at least 10, preferably at least 20, preferably at least 40, preferably at least 100, contiguous polypeptides and comprises a “G” at the amino acid position corresponding to amino acid 354 of the bradykinin receptor B2 protein, or a portion of SEQ ID NO:568. The invention further relates to isolated nucleic acid molecules encoding such polypeptides or proteins, as well as to antibodies that bind to such proteins or polypeptides.

[0286] Representative disorders which may be detected, diagnosed, identified, treated, prevented, and/or ameliorated by the present invention include, the following, non-limiting diseases and disorders: angioedema, cardiovascular diseases, angina pectoris, hypertension, heart failure, myocardial infarction, ventricular hypertrophy, cough associated with ACE inhibitors, cough associated with vasopeptidase inhibitors, vascular diseases, miscrovascular disease, vascular leak syndrome, aneurysm, stroke, embolism, thrombosis, endothelial dysfunction, coronary artery disease, arteriosclerosis, and/or atherosclerosis.

[0287] Additional disorders which may be detected, diagnosed, identified, treated, prevented, and/or ameliorated by the present invention include, the following, non-limiting diseases and disorders: hypotensive reactions during blood transfusions (Transfusion. 1999 Oct;39(10):1084-8.), hypersensitivity reactions during hemodialysis (Peptides. 1999;20(4):421-30.), sepsis, inflammatory arthritis, and enterocolitis (Clin Rev Allergy Immunol. 1998 Winter;16(4):365-84.), enterocolitis (Gut. 1998 Sep;43(3):365-74.), chronic granulomatous intestinal and systemic inflammation (FASEB J. 1998 Mar;12(3):325-33.), peptidoglycan-induced arthritis (Arthritis Rheum. 1997 Jul;40(7):1327-33.), arthritis (Proc Assoc Am Physicians. 1997 Jan;109(1):10-22.), intestinal inflammation (Dig Dis Sci. 1996 May;41(5):912-20.), acute phase response of inflammation (Peptides. 1996; 17(7): 1163-70.), asthma (J Appl Physiol 1995; 78: 1844-1852), chronic obstructive pulmonary disease (COPD), cough reflex, allergies, and/or neurogenic inflammation.

[0288] In preferred embodiments, the following N-terminal BDKRB2 (SNP_ID: AE104s25) deletion polypeptides are encompassed by the present invention: M1-Q391, F2-Q391, S3-Q391, P4-Q391, W5-Q391, K6-Q391, 17-Q391, S8-Q391, M9-Q391, F10-Q391, L11-Q391, S12-Q391, V13-Q391, R14-Q391, E15-Q391, D16-Q391, S17-Q391, V18-Q391, P19-Q391, T20-Q391, T21-Q391, A22-Q391, S23-Q391, F24-Q391, S25-Q391, A26-Q391, D27-Q391, M28-Q391, L29-Q391, N30-Q391, V31-Q391, T32-Q391, L33-Q391, Q34-Q391, G35-Q391, P36-Q391, T37-Q391, L38-Q391, N39-Q391, G40-Q391, T41-Q391, F42-Q391, A43-Q391, Q44-Q391, S45-Q391, K46-Q391, C47-Q391, P48-Q391, Q49-Q391, V50-Q391, E51-Q391, W52-Q391, L53-Q391, G54-Q391, W55-Q391, L56-Q391, N57-Q391, T58-Q391, I59-Q391, Q60-Q391, P61-Q391, P62-Q391, F63-Q391, L64-Q391, W65-Q391, V66-Q391, L67-Q391, F68-Q391, V69-Q391, L70-Q391, A71-Q391, T72-Q391, L73-Q391, E74-Q391, N75-Q391, 176-Q391, F77-Q391, V78-Q391, L79-Q391, S80-Q391, V81-Q391, F82-Q391, C83-Q391, L84-Q391, H85-Q391, K86-Q391, S87-Q391, S88-Q391, C89-Q391, T90-Q391, V91-Q391, A92-Q391, E93-Q391, I94-Q391, Y95-Q391, L96-Q391, G97-Q391, N98-Q391, L99-Q391, A100-Q391, A101-Q391, A102-Q391, D103-Q391, L104-Q391, I105-Q391, L106-Q391, A107-Q391, C108-Q391, G109-Q391, L110-Q391, P111-Q391, F112-Q391, W113-Q391, A114-Q391, I115-Q391, T116-Q391, I117-Q391, S118-Q391, N119-Q391, N120-Q391, F121-Q391, D122-Q391, W123-Q391, L124-Q391, F125-Q391, G126-Q391, E127-Q391, T128-Q391, L129-Q391, C130-Q391, R131-Q391, V132-Q391, V133-Q391, N134-Q391, A135-Q391, I136-Q391, I137-Q391, S138-Q391, M139-Q391, N140-Q391, L141-Q391, Y142-Q391, S143-Q391, S144-Q391, I145-Q391, C146-Q391, F147-Q391, L148-Q391, M149-Q391, L150-Q391, V151-Q391, S152-Q391, I153-Q391, D154-Q391, R155-Q391, Y156-Q391, L157-Q391, A158-Q391, L159-Q391, V160-Q391, K161-Q391, T162-Q391, M163-Q391, S164-Q391, M165-Q391, G166-Q391, R167-Q391, M168-Q391, R169-Q391, G170-Q391, V171-Q391, R172-Q391, W173-Q391, A174-Q391, K175-Q391, L176-Q391, Y177-Q391, S178-Q391, L179-Q391, V180-Q391, I181-Q391, W182-Q391, G183-Q391, C184-Q391, T185-Q391, L186-Q391, L187-Q391, L188-Q391, S189-Q391, S190-Q391, P191-Q391, M192-Q391, L193-Q391, V194-Q391, F195-Q391, R196-Q391, T197-Q391, M198-Q391, K199-Q391, E200-Q391, Y201-Q391, S202-Q391, D203-Q391, E204-Q391, G205-Q391, H206-Q391, N207-Q391, V208-Q391, T209-Q391, A210-Q391, C211-Q391, V212-Q391, I213-Q391, S214-Q391, Y215-Q391, P216-Q391, S217-Q391, L218-Q391, I219-Q391, W220-Q391, E221-Q391, V222-Q391, F223-Q391, T224-Q391, N225-Q391, M226-Q391, L227-Q391, L228-Q391, N229-Q391, V230-Q391, V231-Q391, G232-Q391, F233-Q391, L234-Q391, L235-Q391, P236-Q391, L237-Q391, S238-Q391, V239-Q391, I240-Q391, T241-Q391, F242-Q391, C243-Q391, T244-Q391, M245-Q391, Q246-Q391, I247-Q391, M248-Q391, Q249-Q391, V250-Q391, L251-Q391, R252-Q391, N253-Q391, N254-Q391, E255-Q391, M256-Q391, Q257-Q391, K258-Q391, F259-Q391, K260-Q391, E261-Q391, I262-Q391, Q263-Q391, T264-Q391, E265-Q391, R266-Q391, R267-Q391, A268-Q391, T269-Q391, V270-Q391, L271-Q391, V272-Q391, L273-Q391, V274-Q391, V275-Q391, L276-Q391, L277-Q391, L278-Q391, F279-Q391, I280-Q391, I281-Q391, C282-Q391, W283-Q391, L284-Q391, P285-Q391, F286-Q391, Q287-Q391, I288-Q391, S289-Q391, T290-Q391, F291-Q391, L292-Q391, D293-Q391, T294-Q391, L295-Q391, H296-Q391, R297-Q391, L298-Q391, G299-Q391, I300-Q391, L301-Q391, S302-Q391, S303-Q391, C304-Q391, Q305-Q391, D306-Q391, E307-Q391, R308-Q391, I309-Q391, I310-Q391, D311-Q391, V312-Q391, I313-Q391, T314-Q391, Q315-Q391, I316-Q391, A317-Q391, S318-Q391, F319-Q391, M320-Q391, A321-Q391, Y322-Q391, S323-Q391, N324-Q391, S325-Q391, C326-Q391, L327-Q391, N328-Q391, P329-Q391, L330-Q391, V331-Q391, Y332-Q391, V333-Q391, I334-Q391, V335-Q391, G336-Q391, K337-Q391, R338-Q391, F339-Q391, R340-Q391, K341-Q391, K342-Q391, S343-Q391, W344-Q391, E345-Q391, V346-Q391, Y347-Q391, Q348-Q391, G349-Q391, V350-Q391, C351-Q391, Q352-Q391, K353-Q391, E354-Q391, G355-Q391, C356-Q391, R357-Q391, S358-Q391, E359-Q391, P360-Q391, I361-Q391, Q362-Q391, M363-Q391, E364-Q391, N365-Q391, S366-Q391, M367-Q391, G368-Q391, T369-Q391, L370-Q391, R371-Q391, T372-Q391, S373-Q391, I374-Q391, S375-Q391, V376-Q391, E377-Q391, R378-Q391, Q379-Q391, I380-Q391, H381-Q391, K382-Q391, L383-Q391, Q384-Q391, and/or D385-Q391 of SEQ ID NO:568. Polynucleotide sequences encoding these polypeptides are also provided. The present invention also encompasses the use of these N-terminal BDKRB2 (SNP_ID: AE104s25) deletion polypeptides as immunogenic and/or antigenic epitopes as described elsewhere herein.

[0289] In preferred embodiments, the following C-terminal BDKRB2 (SNP_ID: AE104s25) deletion polypeptides are encompassed by the present invention: M1-Q391, M1-R390, M1-S389, M1-G388, M1-A387, M1-W386, M1-D385, M1-Q384, M1-L383, M1-K382, M1-H381, M1-I380, M1-Q379, M1-R378, M1-E377, M1-V376, M1-S375, M1-I374, M1-S373, M1-T372, M1-R371, M1-L370, M1-T369, M1-G368, M1-M367, M1-S366, M1-N365, M1-E364, M1-M363, M1-Q362, M1-I361, M1-P360, M1-E359, M1-S358, M1-R357, M1-C356, M1-G355, M1-E354, M1-K353, M1-Q352, M1-C351, M1-V350, M1-G349, M1-Q348, M1-Y347, M1-V346, M1-E345, M1-W344, M1-S343, M1-K342, M1-K341, M1-R340, M1-F339, M1-R338, M1-K337, M1-G336, M1-V335, M1-I334, M1-V333, M1-Y332, M1-V331, M1-L330, M1-P329, M1-N328, M1-L327, M1-C326, M1-S325, M1-N324, M1-S323, M1-Y322, M1-A321, M1-M320, M1-F319, M1-S318, M1-A317, M1-I316, M1-Q315, M1-T314, M1-I313, M1-V312, M1-D311, M1-I310, M1-I309, M1-R308, M1-E307, M1-D306, M1-Q305, M1-C304, M1-S303, M1-S302, M1-L301, M1-I300, M1-G299, M1-L298, M1-R297, M1-H296, M1-L295, M1-T294, M1-D293, M1-L292, M1-F291, M1-T290, M1-S289, M1-I288, M1-Q287, M1-F286, M1-P285, M1-L284, M1-W283, M1-C282, M1-I281, M1-I280, M1-F279, M1-L278, M1-L277, M1-L276, M1-V275, M1-V274, M1-L273, M1-V272, M1-L271, M1-V270, M1-T269, M1-A268, M1-R267, M1-R266, M1-E265, M1-T264, M1-Q263, M1-I262, M1-E261, M1-K260, M1-F259, M1-K258, M1-Q257, M1-M256, M1-E255, M1-N254, M1-N253, M1-R252, M1-L251, M1-V250, M1-Q249, M1-M248, M1-I247, M1-Q246, M1-M245, M1-T244, M1-C243, M1-F242, M1-T241, M1-I240, M1-V239, M1-S238, M1-L237, M1-P236, M1-L235, M1-L234, M1-F233, M1-G232, M1-V231, M1-V230, M1-N229, M1-L228, M1-L227, M1-M226, M1-N225, M1-T224, M1-F223, M1-V222, M1-E221, M1-W220, M1-I219, M1-L218, M1-S217, M1-P216, M1-Y215, M1-S214, M1-I213, M1-V212, M1-C211, M1-A210, M1-T209, M1-V208, M1-N207, M1-H206, M1-G205, M1-E204, M1-D203, M1-S202, M1-Y201, M1-E200, M1-K199, M1-M198, M1-T197, M1-R196, M1-F195, M1-V194, M1-L193, M1-M192, M1-P191, M1-S190, M1-S189, M1-L188, M1-L187, M1-L186, M1-T185, M1-C184, M1-G183, M1-W182, M1-I181, M1-V180, M1-L179, M1-S178, M1-Y177, M1-L176, M1-K175, M1-A174, M1-W173, M1-R172, M1-V171, M1-G170, M1-R169, M1-M168, M1-R167, M1-G166, M1-M165, M1-S164, M1-M163, M1-T162, M1-K161, M1-V160, M1-L159, M1-A158, M1-L157, M1-Y156, M1-R155, M1-D154, M1-I153, M1-S152, M1-V151, M1-L150, M1-M149, M1-L148, M1-F147, M1-C146, M1-I145, M1-S144, M1-S143, M1-Y142, M1-L141, M1-N140, M1-M139, M1-S138, M1-I137, M1-I136, M1-A135, M1-N134, M1-VI33, M1-V132, M1-R131, M1-C130, M1-L129, M1-T128, M1-E127, M1-G126, M1-FI25, M1-L124, M1-W123, M1-D122, M1-F121, M1-N120, M1-N119, M1-S118, M1-I 17, M1-T116, M1-I115, M1-A114, M1-W113, M1-F112, M1-111, M1-L110, M1-G109, M1-C108, M1-A107, M1-L106, M1-I105, M1-L104, M1-D103, M1-A102, M1-A101, M1-A100, M1-L99, M1-N98, M1-G97, M1-L96, M1-Y95, M1-194, M1-E93, M1-A92, M1-V91, M1-T90, M1-C89, M1-S88, M1-S87, M1-K86, M1-H85, M1-L84, M1-C83, M1-F82, M1-V81, M1-S80, M1-L79, M1-V78, M1-F77, M1-176, M1-N75, M1-E74, M1-L73, M1-T72, M1-A71, M1-L70, M1-V69, M1-F68, M1-L67, M1-V66, M1-W65, M1-L64, M1-F63, M1-P62, M1-P61, M1-Q60, M1-159, M1-T58, M1-N57, M1-L56, M1-W55, M1-G54, M1-L53, M1-W52, M1-E51, M1-V50, M1-Q49, M1-P48, M1-C47, M1-K46, M1-S45, M1-Q44, M1-A43, M1-F42, M1-T41, M1-G40, M1-N39, M1-L38, M1-T37, M1-P36, M1-G35, M1-Q34, M1-L33, M1-T32, M1-V31, M1-N30, M1-L29, M1-M28, M1-D27, M1-A26, M1-S25, M1-F24, M1-S23, M1-A22, M1-T21, M1-T20, M1-P19, M1-V18, M1-S17, M1-D16, M1-E15, M1-R14, M1-V13, M1-S12, M1-L11, M1-F10, M1-M9, M1-S8, and/or M1-17 of SEQ ID NO:568. Polynucleotide sequences encoding these polypeptides are also provided. The present invention also encompasses the use of these C-terminal BDKRB2 (SNP_ID: AE104s25) deletion polypeptides as immunogenic and/or antigenic epitopes as described elsewhere herein.

[0290] Alternatively, preferred polypeptides of the present invention may comprise polypeptide sequences corresponding to, for example, internal regions of the BDKRB2 (SNP_ID: AE104s25) polypeptide (e.g., any combination of both N- and C-terminal BDKRB2 (SNP_ID: AE104s25) polypeptide deletions) of SEQ ID NO:568. For example, internal regions could be defined by the equation: amino acid NX to amino acid CX, wherein NX refers to any N-terminal deletion polypeptide amino acid of BDKRB2 (SNP_ID: AE104s25) (SEQ ID NO:568), and where CX refers to any C-terminal deletion polypeptide amino acid of BDKRB2 (SNP_ID: AE104s25) (SEQ ID NO:568). Polynucleotides encoding these polypeptides are also provided. The present invention also encompasses the use of these polypeptides as an immunogenic and/or antigenic epitope as described elsewhere herein. Preferably, the resulting deletion polypeptide comprises the polypeptide polymorphic loci identified elsewhere herein for BDKRB2 (SNP_ID: AE104s25), and more preferably comprises the polypeptide polymorphic allele identified elsewhere herein for BDKRB2 (SNP_ID: AE104s25).

[0291] Features of the Polypeptide Encoded by Gene No:20

[0292] The present invention relates to isolated nucleic acid molecules comprising, or alternatively, consisting of all or a portion of the variant allele of the human protease inhibitor 4 gene (e.g., wherein reference or wildtype protease inhibitor 4 gene is exemplified by SEQ ID NO:571). Preferred portions are at least 10, preferably at least 20, preferably at least 40, preferably at least 100, contiguous polynucleotides and comprise a “T” at the nucleotide position corresponding to nucleotide 699 of the protease inhibitor 4 gene, or a portion of SEQ ID NO:573. Alternatively, preferred portions are at least 10, preferably at least 20, preferably at least 40, preferably at least 100, contiguous polynucleotides and comprise a “C” at the nucleotide position corresponding to nucleotide 699 of the protease inhibitor 4 gene, or a portion of SEQ ID NO:573. The invention further relates to isolated gene products, e.g., polypeptides and/or proteins, which are encoded by a nucleic acid molecule comprising all or a portion of the variant allele of the protease inhibitor 4 gene.

[0293] In one embodiment, the invention relates to a method for predicting the likelihood that an individual will have a disorder associated with a “T” at the nucleotide position corresponding to nucleotide position 699 of SEQ ID NO:573 (or diagnosing or aiding in the diagnosis of such a disorder) comprising the steps of obtaining a DNA sample from an individual to be assessed and determining the nucleotide present at position 699 of SEQ ID NO:573. The presence of a “T” at this position indicates that the individual has a greater likelihood of having a disorder associated therewith than an individual having a “C” at that position, or a greater likelihood of having more severe symptoms.

[0294] Conversely, the invention relates to a method for predicting the likelihood that an individual will have a disorder associated with a “C” at the nucleotide position corresponding to nucleotide position 699 of SEQ ID NO:573 (or diagnosing or aiding in the diagnosis of such a disorder) comprising the steps of obtaining a DNA sample from an individual to be assessed and determining the nucleotide present at position 699 of SEQ ID NO:573. The presence of a “C” at this position indicates that the individual has a greater likelihood of having a disorder associated therewith than an individual having a “T” at that position, or a greater likelihood of having more severe symptoms.

[0295] Representative disorders which may be detected, diagnosed, identified, treated, prevented, and/or ameliorated by the present invention include, the following, non-limiting diseases and disorders: angioedema, cardiovascular diseases, angina pectoris, hypertension, heart failure, myocardial infarction, ventricular hypertrophy, cough associated with ACE inhibitors, cough associated with vasopeptidase inhibitors, vascular diseases, miscrovascular disease, vascular leak syndrome, aneurysm, stroke, embolism, thrombosis, endothelial dysfunction, coronary artery disease, arteriosclerosis, and/or atherosclerosis.

[0296] Additional disorders which may be detected, diagnosed, identified, treated, prevented, and/or ameliorated by the present invention include, the following, non-limiting diseases and disorders: hypotensive reactions during blood transfusions (Transfusion. 1999 Oct;39(10): 1084-8.), hypersensitivity reactions during hemodialysis (Peptides. 1999;20(4):421-30.), sepsis, inflammatory arthritis, and enterocolitis (Clin Rev Allergy Immunol. 1998 Winter;16(4):365-84.), enterocolitis (Gut. 1998 Sep;43(3):365-74.), chronic granulomatous intestinal and systemic inflammation (FASEB J. 1998 Mar;12(3):325-33.), peptidoglycan-induced arthritis (Arthritis Rheum. 1997 Jul;40(7):1327-33.), arthritis (Proc Assoc Am Physicians. 1997 Jan;109(1):10-22.), intestinal inflammation (Dig Dis Sci. 1996 May;41(5):912-20.), acute phase response of inflammation (Peptides. 1996; 17(7): 1163-70.), asthma (J Appl Physiol 1995; 78: 1844-1852), chronic obstructive pulmonary disease (COPD), cough reflex, allergies, and/or neurogenic inflammation.

[0297] The invention encompasses the encoding polynucleotide of the SERPINA4/AE110s2 gene (SEQ ID NO:573) containing a transcriptional stop codon, specifically nucleotides 1 to 1284 of SEQ ID NO:573.

[0298] Features of the Polypeptide Encoded by Gene No:21

[0299] The present invention relates to isolated nucleic acid molecules comprising, or alternatively, consisting of all or a portion of the variant allele of the human protease inhibitor 4 gene (e.g., wherein reference or wildtype protease inhibitor 4 gene is exemplified by SEQ ID NO:571). Preferred portions are at least 10, preferably at least 20, preferably at least 40, preferably at least 100, contiguous polynucleotides and comprise a “C” at the nucleotide position corresponding to nucleotide 597 of the protease inhibitor 4 gene, or a portion of SEQ ID NO:575. Alternatively, preferred portions are at least 10, preferably at least 20, preferably at least 40, preferably at least 100, contiguous polynucleotides and comprise a “T” at the nucleotide position corresponding to nucleotide 597 of the protease inhibitor 4 gene, or a portion of SEQ ID NO:575. The invention further relates to isolated gene products, e.g., polypeptides and/or proteins, which are encoded by a nucleic acid molecule comprising all or a portion of the variant allele of the protease inhibitor 4 gene.

[0300] In one embodiment, the invention relates to a method for predicting the likelihood that an individual will have a disorder associated with a “C” at the nucleotide position corresponding to nucleotide position 597 of SEQ ID NO:575 (or diagnosing or aiding in the diagnosis of such a disorder) comprising the steps of obtaining a DNA sample from an individual to be assessed and determining the nucleotide present at position 597 of SEQ ID NO:575. The presence of a “C” at this position indicates that the individual has a greater likelihood of having a disorder associated therewith than an individual having a “T” at that position, or a greater likelihood of having more severe symptoms.

[0301] Conversely, the invention relates to a method for predicting the likelihood that an individual will have a disorder associated with a “T” at the nucleotide position corresponding to nucleotide position 597 of SEQ ID NO:575 (or diagnosing or aiding in the diagnosis of such a disorder) comprising the steps of obtaining a DNA sample from an individual to be assessed and determining the nucleotide present at position 597 of SEQ ID NO:575. The presence of a “T” at this position indicates that the individual has a greater likelihood of having a disorder associated therewith than an individual having a “C” at that position, or a greater likelihood of having more severe symptoms.

[0302] Representative disorders which may be detected, diagnosed, identified, treated, prevented, and/or ameliorated by the present invention include, the following, non-limiting diseases and disorders: angioedema, cardiovascular diseases, angina pectoris, hypertension, heart failure, myocardial infarction, ventricular hypertrophy, cough associated with ACE inhibitors, cough associated with vasopeptidase inhibitors, vascular diseases, miscrovascular disease, vascular leak syndrome, aneurysm, stroke, embolism, thrombosis, endothelial dysfunction, coronary artery disease, arteriosclerosis, and/or atherosclerosis.

[0303] Additional disorders which may be detected, diagnosed, identified, treated, prevented, and/or ameliorated by the present invention include, the following, non-limiting diseases and disorders: hypotensive reactions during blood transfusions (Transfusion. 1999 Oct;39(10): 1084-8.), hypersensitivity reactions during hemodialysis (Peptides. 1999;20(4):421-30.), sepsis, inflammatory arthritis, and enterocolitis (Clin Rev Allergy Immunol. 1998 Winter;16(4):365-84.), enterocolitis (Gut. 1998 Sep;43(3):365-74.), chronic granulomatous intestinal and systemic inflammation (FASEB J. 1998 Mar;12(3):325-33.), peptidoglycan-induced arthritis (Arthritis Rheum. 1997 Jul;40(7):1327-33.), arthritis (Proc Assoc Am Physicians. 1997 Jan;109(1):10-22.), intestinal inflammation (Dig Dis Sci. 1996 May;41(5):912-20.), acute phase response of inflammation (Peptides. 1996; 17(7): 1163-70.), asthma (J Appl Physiol 1995; 78: 1844-1852), chronic obstructive pulmonary disease (COPD), cough reflex, allergies, and/or neurogenic inflammation.

[0304] The invention encompasses the encoding polynucleotide of the SERPINA4/AE110s5 gene (SEQ ID NO:575) containing a transcriptional stop codon, specifically nucleotides 1 to 1284 of SEQ ID NO:575.

[0305] Features of the Polypeptide Encoded by Gene No:22

[0306] The present invention relates to isolated nucleic acid molecules comprising, or alternatively, consisting of all or a portion of the variant allele of the human angiotension converting enzyme 2 gene (e.g., wherein reference or wildtype angiotension converting enzyme 2 gene is exemplified by SEQ ID NO:569). Preferred portions are at least 10, preferably at least 20, preferably at least 40, preferably at least 100, contiguous polynucleotides and comprise a “C” at the nucleotide position corresponding to nucleotide 2173 of the angiotension converting enzyme 2 gene, or a portion of SEQ ID NO:842. Alternatively, preferred portions are at least 10, preferably at least 20, preferably at least 40, preferably at least 100, contiguous polynucleotides and comprise a “T” at the nucleotide position corresponding to nucleotide 2173 of the angiotension converting enzyme 2 gene, or a portion of SEQ ID NO:842. The invention further relates to isolated gene products, e.g., polypeptides and/or proteins, which are encoded by a nucleic acid molecule comprising all or a portion of the variant allele of the angiotension converting enzyme 2 gene.

[0307] In one embodiment, the invention relates to a method for predicting the likelihood that an individual will have a disorder associated with a “C” at the nucleotide position corresponding to nucleotide position 2173 of SEQ ID NO:842 (or diagnosing or aiding in the diagnosis of such a disorder) comprising the steps of obtaining a DNA sample from an individual to be assessed and determining the nucleotide present at position 2173 of SEQ ID NO:842. The presence of a “C” at this position indicates that the individual has a greater likelihood of having a disorder associated therewith than an individual having a “T” at that position, or a greater likelihood of having more severe symptoms.

[0308] Conversely, the invention relates to a method for predicting the likelihood that an individual will have a disorder associated with a “T” at the nucleotide position corresponding to nucleotide position 2173 of SEQ ID NO:842 (or diagnosing or aiding in the diagnosis of such a disorder) comprising the steps of obtaining a DNA sample from an individual to be assessed and determining the nucleotide present at position 2173 of SEQ ID NO:842. The presence of a “T” at this position indicates that the individual has a greater likelihood of having a disorder associated therewith than an individual having a “C” at that position, or a greater likelihood of having more severe symptoms.

[0309] Representative disorders which may be detected, diagnosed, identified, treated, prevented, and/or ameliorated by the present invention include, the following, non-limiting diseases and disorders: angioedema, cardiovascular diseases, angina pectoris, hypertension, heart failure, myocardial infarction, ventricular hypertrophy, cough associated with ACE inhibitors, cough associated with vasopeptidase inhibitors, vascular diseases, miscrovascular disease, vascular leak syndrome, aneurysm, stroke, embolism, thrombosis, endothelial dysfunction, coronary artery disease, arteriosclerosis, and/or atherosclerosis.

[0310] Additional disorders which may be detected, diagnosed, identified, treated, prevented, and/or ameliorated by the present invention include, the following, non-limiting diseases and disorders: hypotensive reactions during blood transfusions (Transfusion. 1999 Oct;39(10):1084-8.), hypersensitivity reactions during hemodialysis (Peptides. 1999;20(4):421-30.), sepsis, inflammatory arthritis, and enterocolitis (Clin Rev Allergy Immunol. 1998 Winter;16(4):365-84.), enterocolitis (Gut. 1998 Sep;43(3):365-74.), chronic granulomatous intestinal and systemic inflammation (FASEB J. 1998 Mar;12(3):325-33.), peptidoglycan-induced arthritis (Arthritis Rheum. 1997 Jul;40(7):1327-33.), arthritis (Proc Assoc Am Physicians. 1997 Jan;109(l):10-22.), intestinal inflammation (Dig Dis Sci. 1996 May;41(5):912-20.), acute phase response of inflammation (Peptides. 1996;17(7):1163-70.), asthma (J Appl Physiol 1995; 78: 1844-1852), chronic obstructive pulmonary disease (COPD), cough reflex, allergies, and/or neurogenic inflammation.

[0311] The invention encompasses the encoding polynucleotide of the ACE2/AE109s7 gene (SEQ ID NO:842) containing a transcriptional stop codon, specifically nucleotides 104 to 2521 of SEQ ID NO:842.

[0312] Features of the Polypeptide Encoded by Gene No:23

[0313] The present invention relates to isolated nucleic acid molecules comprising, or alternatively, consisting of all or a portion of the variant allele of the human aminopeptidase P gene (e.g., wherein reference or wildtype aminopeptidase P gene is exemplified by SEQ ID NO: 1). Preferred portions are at least 10, preferably at least 20, preferably at least 40, preferably at least 100, contiguous polynucleotides and comprise a “T” at the nucleotide position corresponding to nucleotide 711 of the aminopeptidase P gene, or a portion of SEQ ID NO:846. Alternatively, preferred portions are at least 10, preferably at least 20, preferably at least 40, preferably at least 100, contiguous polynucleotides and comprise a “C” at the nucleotide position corresponding to nucleotide 711 of the aminopeptidase P gene, or a portion of SEQ ID NO:846. The invention further relates to isolated gene products, e.g., polypeptides and/or proteins, which are encoded by a nucleic acid molecule comprising all or a portion of the variant allele of the aminopeptidase P gene.

[0314] In one embodiment, the invention relates to a method for predicting the likelihood that an individual will have a disorder associated with a “T” at the nucleotide position corresponding to nucleotide position 711 of SEQ ID NO:846 (or diagnosing or aiding in the diagnosis of such a disorder) comprising the steps of obtaining a DNA sample from an individual to be assessed and determining the nucleotide present at position 711 of SEQ ID NO:846. The presence of a “C” at this position indicates that the individual has a greater likelihood of having a disorder associated therewith than an individual having a “T” at that position, or a greater likelihood of having more severe symptoms.

[0315] Conversely, the invention relates to a method for predicting the likelihood that an individual will have a disorder associated with a “C” at the nucleotide position corresponding to nucleotide position 711 of SEQ ID NO:846 (or diagnosing or aiding in the diagnosis of such a disorder) comprising the steps of obtaining a DNA sample from an individual to be assessed and determining the nucleotide present at position 711 of SEQ ID NO:846. The presence of a “T” at this position indicates that the individual has a greater likelihood of having a disorder associated therewith than an individual having a “C” at that position, or a greater likelihood of having more severe symptoms.

[0316] Representative disorders which may be detected, diagnosed, identified, treated, prevented, and/or ameliorated by the present invention include, the following, non-limiting diseases and disorders: angioedema, cardiovascular diseases, angina pectoris, hypertension, heart failure, myocardial infarction, ventricular hypertrophy, cough associated with ACE inhibitors, cough associated with vasopeptidase inhibitors, vascular diseases, miscrovascular disease, vascular leak syndrome, aneurysm, stroke, embolism, thrombosis, endothelial dysfunction, coronary artery disease, arteriosclerosis, and/or atherosclerosis.

[0317] Additional disorders which may be detected, diagnosed, identified, treated, prevented, and/or ameliorated by the present invention include, the following, non-limiting diseases and disorders: hypotensive reactions during blood transfusions (Transfusion. 1999 Oct;39(10):1084-8.), hypersensitivity reactions during hemodialysis (Peptides. 1999;20(4):421-30.), sepsis, inflammatory arthritis, and enterocolitis (Clin Rev Allergy Immunol. 1998 Winter;16(4):365-84.), enterocolitis (Gut. 1998 Sep;43(3):365-74.), chronic granulomatous intestinal and systemic inflammation (FASEB J. 1998 Mar;12(3):325-33.), peptidoglycan-induced arthritis (Arthritis Rheum. 1997 Jul;40(7):1327-33.), arthritis (Proc Assoc Am Physicians. 1997 Jan;109(1):10-22.), intestinal inflammation (Dig Dis Sci. 1996 May;41(5):912-20.), acute phase response of inflammation (Peptides. 1996; 17(7): 1163-70.), asthma (J Appl Physiol 1995; 78: 1844-1852), chronic obstructive pulmonary disease (COPD), cough reflex, allergies, and/or neurogenic inflammation.

[0318] Features of the Polypeptide Encoded by Gene No:24

[0319] The present invention relates to isolated nucleic acid molecules comprising, or alternatively, consisting of all or a portion of the variant allele of the human bradykinin receptor B1 gene (e.g., wherein reference or wildtype bradykinin receptor B1 gene is exemplified by SEQ ID NO:5). Preferred portions are at least 10, preferably at least 20, preferably at least 40, preferably at least 100, contiguous polynucleotides and comprise an “A” at the nucleotide position corresponding to nucleotide 728 of the bradykinin receptor B1 gene, or a portion of SEQ ID NO:848. Alternatively, preferred portions are at least 10, preferably at least 20, preferably at least 40, preferably at least 100, contiguous polynucleotides and comprise a “G” at the nucleotide position corresponding to nucleotide 728 of the bradykinin receptor B1 gene, or a portion of SEQ ID NO:848. The invention further relates to isolated gene products, e.g., polypeptides and/or proteins, which are encoded by a nucleic acid molecule comprising all or a portion of the variant allele of the bradykinin receptor B1 gene.

[0320] In one embodiment, the invention relates to a method for predicting the likelihood that an individual will have a disorder associated with an “A” at the nucleotide position corresponding to nucleotide position 728 of SEQ ID NO:848 (or diagnosing or aiding in the diagnosis of such a disorder) comprising the steps of obtaining a DNA sample from an individual to be assessed and determining the nucleotide present at position 728 of SEQ ID NO:848. The presence of an “A” at this position indicates that the individual has a greater likelihood of having a disorder associated therewith than an individual having a “G” at that position, or a greater likelihood of having more severe symptoms.

[0321] Conversely, the invention relates to a method for predicting the likelihood that an individual will have a disorder associated with a “G” at the nucleotide position corresponding to nucleotide position 728 of SEQ ID NO:848 (or diagnosing or aiding in the diagnosis of such a disorder) comprising the steps of obtaining a DNA sample from an individual to be assessed and determining the nucleotide present at position 728 of SEQ ID NO:848. The presence of a “G” at this position indicates that the individual has a greater likelihood of having a disorder associated therewith than an individual having a “A” at that position, or a greater likelihood of having more severe symptoms.

[0322] The present invention further relates to isolated proteins or polypeptides comprising, or alternatively, consisting of all or a portion of the encoded variant amino acid sequence of the human bradykinin receptor B1 polypeptide (e.g., wherein reference or wildtype bradykinin receptor B1 polypeptide is exemplified by SEQ ID NO:6). Preferred portions are at least 10, preferably at least 20, preferably at least 40, preferably at least 100, contiguous polypeptides and comprises an “Q” at the amino acid position corresponding to amino acid 241 of the bradykinin receptor B1 polypeptide, or a portion of SEQ ID NO:849. Alternatively, preferred portions are at least 10, preferably at least 20, preferably at least 40, preferably at least 100, contiguous polypeptides and comprises a “R” at the amino acid position corresponding to amino acid 241 of the bradykinin receptor B1 protein, or a portion of SEQ ID NO:849. The invention further relates to isolated nucleic acid molecules encoding such polypeptides or proteins, as well as to antibodies that bind to such proteins or polypeptides.

[0323] Representative disorders which may be detected, diagnosed, identified, treated, prevented, and/or ameliorated by the present invention include, the following, non-limiting diseases and disorders: angioedema, cardiovascular diseases, angina pectoris, hypertension, heart failure, myocardial infarction, ventricular hypertrophy, cough associated with ACE inhibitors, cough associated with vasopeptidase inhibitors, vascular diseases, miscrovascular disease, vascular leak syndrome, aneurysm, stroke, embolism, thrombosis, endothelial dysfunction, coronary artery disease, arteriosclerosis, and/or atherosclerosis.

[0324] Additional disorders which may be detected, diagnosed, identified, treated, prevented, and/or ameliorated by the present invention include, the following, non-limiting diseases and disorders: hypotensive reactions during blood transfusions (Transfusion. 1999 Oct;39(10): 1084-8.), hypersensitivity reactions during hemodialysis (Peptides. 1999;20(4):421-30.), sepsis, inflammatory arthritis, and enterocolitis (Clin Rev Allergy Immunol. 1998 Winter;16(4):365-84.), enterocolitis (Gut. 1998 Sep;43(3):365-74.), chronic granulomatous intestinal and systemic inflammation (FASEB J. 1998 Mar;12(3):325-33.), peptidoglycan-induced arthritis (Arthritis Rheum. 1997 Jul;40(7):1327-33.), arthritis (Proc Assoc Am Physicians. 1997 Jan;109(1):10-22.), intestinal inflammation (Dig Dis Sci. 1996 May;41(5):912-20.), acute phase response of inflammation (Peptides. 1996; 17(7): 1163-70.), asthma (J Appl Physiol 1995; 78: 1844-1852), chronic obstructive pulmonary disease (COPD), cough reflex, allergies, and/or neurogenic inflammation.

[0325] In preferred embodiments, the following N-terminal BDKRB1 (SNP_ID:AE103s10) deletion polypeptides are encompassed by the present invention: M1-N353, A2-N353, S3-N353, S4-N353, W5-N353, P6-N353, P7-N353, L8-N353, E9-N353, L10-N353, Q11-N353, S12-N353, S13-N353, N14-N353, Q15-N353, S16-N353, Q17-N353, L18-N353, F19-N353, P20-N353, Q21-N353, N22-N353, A23-N353, T24-N353, A25-N353, C26-N353, D27-N353, N28-N353, A29-N353, P30-N353, E31-N353, A32-N353, W33-N353, D34-N353, L35-N353, L36-N353, H37-N353, R38-N353, V39-N353, L40-N353, P41-N353, T42-N353, F43-N353, 144-N353, I45-N353, S46-N353, I47-N353, C48-N353, F49-N353, F50-N353, G51-N353, L52-N353, L53-N353, G54-N353, N55-N353, L56-N353, F57-N353, V58-N353, L59-N353, L60-N353, V61-N353, F62-N353, L63-N353, L64-N353, P65-N353, R66-N353, R67-N353, Q68-N353, L69-N353, N70-N353, V71-N353, A72-N353, E73-N353, I74-N353, Y75-N353, L76-N353, A77-N353, N78-N353, L79-N353, A80-N353, A81-N353, S82-N353, D83-N353, L84-N353, V85-N353, F86-N353, V87-N353, L88-N353, G89-N353, L90-N353, P91-N353, F92-N353, W93-N353, A94-N353, E95-N353, N96-N353, I97-N353, W98-N353, N99-N353, Q100-N353, F101-N353, N102-N353, W103-N353, P104-N353, F105-N353, G106-N353, A107-N353, L108-N353, L109-N353, C110-N353, R111-N353, V112-N353,I113-N353, N114-N353, G115-N353, V116-N353, I117-N353, K118-N353, Al19-N353, N120-N353, L121-N353, F122-N353, I123-N353, S124-N353, I125-N353, F126-N353, L127-N353, V128-N353, V129-N353, A130-N353, I131-N353, S132-N353, Q133-N353, D134-N353, R135-N353, Y136-N353, R137-N353, V138-N353, L139-N353, V140-N353, H141-N353, P142-N353, M143-N353, A144-N353, S145-N353, G146-N353, R147-N353, Q148-N353, Q149-N353, R150-N353, R151-N353, R152-N353, Q153-N353, A154-N353, R155-N353, V156-N353, T157-N353, C158-N353, V159-N353, L160-N353, I161-N353, W162-N353, V163-N353, V164-N353, G165-N353, G166-N353, L167-N353, L168-N353, S169-N353, I170-N353, P171-N353, T172-N353, F173-N353, L174-N353, L175-N353, R176-N353, S177-N353, I178-N353, Q179-N353, A180-N353, V181-N353, P182-N353, D183-N353, L184-N353, N185-N353, I186-N353, T187-N353, A188-N353, C189-N353, I190-N353, L191-N353, L192-N353, L193-N353, P194-N353, H195-N353, E196-N353, A197-N353, W198-N353, H199-N353, F200-N353, A201-N353, R202-N353, 1203-N353, V204-N353, E205-N353, L206-N353, N207-N353, I208-N353, L209-N353, G210-N353, F211-N353, L212-N353, L213-N353, P214-N353, L215-N353, A216-N353, A217-N353, I218-N353, V219-N353, F220-N353, F221-N353, N222-N353, Y223-N353, H224-N353, I225-N353, L226-N353, A227-N353, S228-N353, L229-N353, R230-N353, T231-N353, R232-N353, E233-N353, E234-N353, V235-N353, S236-N353, R237-N353, T238-N353, R239-N353, V240-N353, Q241-N353, G242-N353, P243-N353, K244-N353, D245-N353, S246-N353, K247-N353, T248-N353, T249-N353, A250-N353, L251-N353, I252-N353, L253-N353, T254-N353, L255-N353, V256-N353, V257-N353, A258-N353, F259-N353, L260-N353, V261-N353, C262-N353, W263-N353, A264-N353, P265-N353, Y266-N353, H267-N353, F268-N353, F269-N353, A270-N353, F271-N353, L272-N353, E273-N353, F274-N353, L275-N353, F276-N353, Q277-N353, V278-N353, Q279-N353, A280-N353, V281-N353, R282-N353, G283-N353, C284-N353, F285-N353, W286-N353, E287-N353, D288-N353, F289-N353, I290-N353, D291-N353, L292-N353, G293-N353, L294-N353, Q295-N353, L296-N353, A297-N353, N298-N353, F299-N353, F300-N353, A301-N353, F302-N353, T303-N353, N304-N353, S305-N353, S306-N353, L307-N353, N308-N353, P309-N353, V310-N353, I311-N353, Y312-N353, V313-N353, F314-N353, V315-N353, G316-N353, R317-N353, L318-N353, F319-N353, R320-N353, T321-N353, K322-N353, V323-N353, W324-N353, E325-N353, L326-N353, Y327-N353, K328-N353, Q329-N353, C330-N353, T331-N353, P332-N353, K333-N353, S334-N353, L335-N353, A336-N353, P337-N353, I338-N353, S339-N353, S340-N353, S341-N353, H342-N353, R343-N353, K344-N353, E345-N353, 1346-N353, and/or F347-N353 of SEQ ID NO:849. Polynucleotide sequences encoding these polypeptides are also provided. The present invention also encompasses the use of these N-terminal BDKRB1 (SNP_ID:AE103s10) deletion polypeptides as immunogenic and/or antigenic epitopes as described elsewhere herein.

[0326] In preferred embodiments, the following C-terminal BDKRB1 (SNP_ID:AE103s10) deletion polypeptides are encompassed by the present invention: M1-N353, M1-R352, M1-W351, M1-F350, M1-L349, M1-Q348, M1-F347, M1-1346, M1-E345, M1-K344, M1-R343, M1-H342, M1-S341, M1-S340, M1-S339, M1-I338, M1-P337, M1-A336, M1-L335, M1-S334, M1-K333, M1-P332, M1-T331, M1-C330, M1-Q329, M1-K328, M1-Y327, M1-L326, M1-E325, M1-W324, M1-V323, M1-K322, M1-T321, M1-R320, M1-F319, M1-L318, M1-R317, M1-G316, M1-V315, M1-F314, M1-V313, M1-Y312, M1-I311, M1-V310, M1-P309, M1-N308, M1-L307, M1-S306, M1-S305, M1-N304, M1-T303, M1-F302, M1-A301, M1-F300, M1-F299, M1-N298, M1-A297, M1-L296, M1-Q295, M1-L294, M1-G293, M1-L292, M1-D291, M1-I290, M1-F289, M1-D288, M1-E287, M1-W286, M1-F285, M1-C284, M1-G283, M1-R282, M1-V281, M1-A280, M1-Q279, M1-V278, M1-Q277, M1-F276, M1-L275, M1-F274, M1-E273, M1-L272, M1-F271, M1-A270, M1-F269, M1-F268, M1-H267, M1-Y266, M1-P265, M1-A264, M1-W263, M1-C262, M1-V261, M1-L260, M1-F259, M1-A258, M1-V257, M1-V256, M1-L255, M1-T254, M1-L253, M1-I252, M1-L251, M1-A250, M1-T249, M1-T248, M1-K247, M1-S246, M1-D245, M1-K244, M1-P243, M1-G242, M1-Q241, M1-V240, M1-R239, M1-T238, M1-R237, M1-S236, M1-V235, M1-E234, M1-E233, M1-R232, M1-T231, M1-R230, M1-L229, M1-S228, M1-A227, M1-L226, M1-I225, M1-H224, M1-Y223, M1-N222, M1-F221, M1-F220, M1-V219, M1-I218, M1-A217, M1-A216, M1-L215, M1-P214, M1-L213, M1-L212, M1-F211, M1-G210, M1-L209, M1-I208, M1-N207, M1-L206, M1-E205, M1-V204, M1-I203, M1-R202, M1-A201, M1-F200, M1-H199, M1-W198, M1-A197, M1-E196, M1-H195, M1-P194, M1-L193, M1-L192, M1-L191, M1-I190, M1-C189, M1-A188, M1-T187, M1-I186, M1-N185, M1-L184, M1-D183, M1-P182, M1-V181, M1-A180, M1-Q179, M1-I178, M1-S177, M1-R176, M1-L175, M1-L174, M1-F173, M1-T172, M1-P171, M1-I170, M1-S169, M1-L168, M1-L167, M1-G166, M1-G165, M1-V164, M1-V163, M1-W162, M1-I161, M1-L160, M1-V159, M1-C158, M1-T157, M1-V156, M1-R155, M1-A154, M1-Q153, M1-R152, M1-R151, M1-R150, M1-Q149, M1-Q148, M1-R147, M1-G146, M1-S145, M1-A144, M1-M143, M1-P142, M1-H141, M1-V140, M1-L139, M1-V138, M1-R137, M1-Y136, M1-R135, M1-D134, M1-Q133, M1-S132, M1-I131, M1-A130, M1-V129, M1-V128, M1-L127, M1-F126, M1-I125, M1-S124, M1-I123, M1-F122, M1-L121, M1-N120, M1-A119, M1-K118, M1-I117, M1-V116, M1-G115, M1-N114, M1-I113, M1-VI12, M1-R111, M1-C110, M1-L109, M1-L108, M1-A107, M1-G106, M1-F105, M1-P104, M1-W103, M1-N102, M1-F1i0, M1-Q100, M1-N99, M1-W98, M1-197, M1-N96, M1-E95, M1-A94, M1-W93, M1-F92, M1-P91, M1-L90, M1-G89, M1-L88, M1-V87, M1-F86, M1-V85, M1-L84, M1-D83, M1-S82, M1-A81, M1-A80, M1-L79, M1-N78, M1-A77, M1-L76, M1-Y75, M1-174, M1-E73, M1-A72, M1-V71, M1-N70, M1-L69, M1-Q68, M1-R67, M1-R66, M1-P65, M1-L64, M1-L63, M1-F62, M1-V61, M1-L60, M1-L59, M1-V58, M1-F57, M1-L56, M1-N55, M1-G54, M1-L53, M1-L52, M1-G51, M1-F50, M1-F49, M1-C48, M1-147, M1-S46, M1-I45, M1-144, M1-F43, M1-T42, M1-P41, M1-L40, M1-V39, M1-R38, M1-H37, M1-L36, M1-L35, M1-D34, M1-W33, M1-A32, M1-E31, M1-P30, M1-A29, M1-N28, M1-D27, M1-C26, M1-A25, M1-T24, M1-A23, M1-N22, M1-Q21, M1-P20, M1-F19, M1-L18, M1-Q17, M1-S16, M1-Q15, M1-N14, M1-S13, M1-S12, M1-Q11, M1-L10, M1-E9, M1-L8, and/or M1-P7 of SEQ ID NO:849. Polynucleotide sequences encoding these polypeptides are also provided. The present invention also encompasses the use of these C-terminal BDKRB1 (SNP_ID:AE103s10) deletion polypeptides as immunogenic and/or antigenic epitopes as described elsewhere herein.

[0327] Alternatively, preferred polypeptides of the present invention may comprise polypeptide sequences corresponding to, for example, internal regions of the BDKRB1 (SNP_ID: AE103s10) polypeptide (e.g., any combination of both N- and C-terminal BDKRB1 (SNP_ID: AE103s10) polypeptide deletions) of SEQ ID NO:849. For example, internal regions could be defined by the equation: amino acid NX to amino acid CX, wherein NX refers to any N-terminal deletion polypeptide amino acid of BDKRB1 (SNP_ID: AE103s10) (SEQ ID NO:849), and where CX refers to any C-terminal deletion polypeptide amino acid of BDKRB1 (SNP_ID: AE103s10) (SEQ ID NO:849). Polynucleotides encoding these polypeptides are also provided. The present invention also encompasses the use of these polypeptides as an immunogenic and/or antigenic epitope as described elsewhere herein. Preferably, the resulting deletion polypeptide comprises the polypeptide polymorphic loci identified elsewhere herein for BDKRB1(SNP_ID: AE103s10), and more preferably comprises the polypeptide polymorphic allele identified elsewhere herein for BDKRB1 (SNP_ID: AE103s10).

[0328] Features of the Polypeptide Encoded by Gene No:25

[0329] The present invention relates to isolated nucleic acid molecules comprising, or alternatively, consisting of all or a portion of the variant allele of the human bradykinin receptor B2 gene (e.g., wherein reference or wildtype bradykinin receptor B2 gene is exemplified by SEQ ID NO:11). Preferred portions are at least 10, preferably at least 20, preferably at least 40, preferably at least 100, contiguous polynucleotides and comprise a “C” at the nucleotide position corresponding to nucleotide 47 of the bradykinin receptor B2 gene, or a portion of SEQ ID NO:850. Alternatively, preferred portions are at least 10, preferably at least 20, preferably at least 40, preferably at least 100, contiguous polynucleotides and comprise an “A” at the nucleotide position corresponding to nucleotide 47 of the bradykinin receptor B2 gene, or a portion of SEQ ID NO:850. The invention further relates to isolated gene products, e.g., polypeptides and/or proteins, which are encoded by a nucleic acid molecule comprising all or a portion of the variant allele of the bradykinin receptor B2 gene.

[0330] In one embodiment, the invention relates to a method for predicting the likelihood that an individual will have a disorder associated with a “C” at the nucleotide position corresponding to nucleotide position 47 of SEQ ID NO:850 (or diagnosing or aiding in the diagnosis of such a disorder) comprising the steps of obtaining a DNA sample from an individual to be assessed and determining the nucleotide present at position 47 of SEQ ID NO:850. The presence of a “C” at this position indicates that the individual has a greater likelihood of having a disorder associated therewith than an individual having an “A” at that position, or a greater likelihood of having more severe symptoms.

[0331] Conversely, the invention relates to a method for predicting the likelihood that an individual will have a disorder associated with an “A” at the nucleotide position corresponding to nucleotide position 47 of SEQ ID NO:850 (or diagnosing or aiding in the diagnosis of such a disorder) comprising the steps of obtaining a DNA sample from an individual to be assessed and determining the nucleotide present at position 47 of SEQ ID NO:850. The presence of an “A” at this position indicates that the individual has a greater likelihood of having a disorder associated therewith than an individual having a “C” at that position, or a greater likelihood of having more severe symptoms.

[0332] The present invention further relates to isolated proteins or polypeptides comprising, or alternatively, consisting of all or a portion of the encoded variant amino acid sequence of the human bradykinin receptor B2 polypeptide (e.g., wherein reference or wildtype bradykinin receptor B2 polypeptide is exemplified by SEQ ID NO: 12). Preferred portions are at least 10, preferably at least 20, preferably at least 40, preferably at least 100, contiguous polypeptides and comprises an “A” at the amino acid position corresponding to amino acid 16 of the bradykinin receptor B2 polypeptide, or a portion of SEQ ID NO:851. Alternatively, preferred portions are at least 10, preferably at least 20, preferably at least 40, preferably at least 100, contiguous polypeptides and comprises a “D” at the amino acid position corresponding to amino acid 16 of the bradykinin receptor B2 protein, or a portion of SEQ ID NO:851. The invention further relates to isolated nucleic acid molecules encoding such polypeptides or proteins, as well as to antibodies that bind to such proteins or polypeptides.

[0333] Representative disorders which may be detected, diagnosed, identified, treated, prevented, and/or ameliorated by the present invention include, the following, non-limiting diseases and disorders: angioedema, cardiovascular diseases, angina pectoris, hypertension, heart failure, myocardial infarction, ventricular hypertrophy, cough associated with ACE inhibitors, cough associated with vasopeptidase inhibitors, vascular diseases, miscrovascular disease, vascular leak syndrome, aneurysm, stroke, embolism, thrombosis, endothelial dysfunction, coronary artery disease, arteriosclerosis, and/or atherosclerosis.

[0334] Additional disorders which may be detected, diagnosed, identified, treated, prevented, and/or ameliorated by the present invention include, the following, non-limiting diseases and disorders: hypotensive reactions during blood transfusions (Transfusion. 1999 Oct;39(10):1084-8.), hypersensitivity reactions during hemodialysis (Peptides. 1999;20(4):421-30.), sepsis, inflammatory arthritis, and enterocolitis (Clin Rev Allergy Immunol. 1998 Winter;16(4):365-84.), enterocolitis (Gut. 1998 Sep;43(3):365-74.), chronic granulomatous intestinal and systemic inflammation (FASEB J. 1998 Mar;12(3):325-33.), peptidoglycan-induced arthritis (Arthritis Rheum. 1997 Jul;40(7):1327-33.), arthritis (Proc Assoc Am Physicians. 1997 Jan;109(l):10-22.), intestinal inflammation (Dig Dis Sci. 1996 May;41(5):912-20.), acute phase response of inflammation (Peptides. 1996; 17(7): 1163-70.), asthma (J Appl Physiol 1995; 78: 1844-1852), chronic obstructive pulmonary disease (COPD), cough reflex, allergies, and/or neurogenic inflammation.

[0335] In preferred embodiments, the following N-terminal BDKRB2 (SNP_ID:AE104s31) deletion polypeptides are encompassed by the present invention: M1-Q391, F2-Q391, S3-Q391, P4-Q391, W5-Q391, K6-Q391, 17-Q391, S8-Q391, M9-Q391, F10-Q391, L11-Q391, S12-Q391, V13-Q391, R14-Q391, E15-Q391, A16-Q391, S17-Q391, V18-Q391, P19-Q391, T20-Q391, T21-Q391, A22-Q391, S23-Q391, F24-Q391, S25-Q391, A26-Q391, D27-Q391, M28-Q391, L29-Q391, N30-Q391, V31-Q391, T32-Q391, L33-Q391, Q34-Q391, G35-Q391, P36-Q391, T37-Q391, L38-Q391, N39-Q391, G40-Q391, T41-Q391, F42-Q391, A43-Q391, Q44-Q391, S45-Q391, K46-Q391, C47-Q391, P48-Q391, Q49-Q391, V50-Q391, E51-Q391, W52-Q391, L53-Q391, G54-Q391, W55-Q391, L56-Q391, N57-Q391, T58-Q391, I59-Q391, Q60-Q391, P61-Q391, P62-Q391, F63-Q391, L64-Q391, W65-Q391, V66-Q391, L67-Q391, F68-Q391, V69-Q391, L70-Q391, A71-Q391, T72-Q391, L73-Q391, E74-Q391, N75-Q391, 176-Q391, F77-Q391, V78-Q391, L79-Q391, S80-Q391, V81-Q391, F82-Q391, C83-Q391, L84-Q391, H85-Q391, K86-Q391, S87-Q391, S88-Q391, C89-Q391, T90-Q391, V91-Q391, A92-Q391, E93-Q391, I94-Q391, Y95-Q391, L96-Q391, G97-Q391, N98-Q391, L99-Q391, A100-Q391, A101-Q391, A102-Q391, D103-Q391, L104-Q391, I105-Q391, L106-Q391, A107-Q391, C108-Q391, G109-Q391, L110-Q391, P111-Q391, F112-Q391, W113-Q391, A114-Q391, I115-Q391, T116-Q391, I117-Q391, S118-Q391, N119-Q391, N120-Q391, F121-Q391, D122-Q391, W123-Q391, L124-Q391, F125-Q391, G126-Q391, E127-Q391, T128-Q391, L129-Q391, C130-Q391, R131-Q391, V132-Q391, V133-Q391, N134-Q391, A135-Q391, I136-Q391, I137-Q391, S138-Q391, M139-Q391, N140-Q391, L141-Q391, Y142-Q391, S143-Q391, S144-Q391, I145-Q391, C146-Q391, F147-Q391, L148-Q391, M149-Q391, L150-Q391, V151-Q391, S152-Q391, I153-Q391, D154-Q391, R155-Q391, Y156-Q391, L157-Q391, A158-Q391, L159-Q391, V160-Q391, K161-Q391, T162-Q391, M163-Q391, S164-Q391, M165-Q391, G166-Q391, R167-Q391, M168-Q391, R169-Q391, G170-Q391, V171-Q391, R172-Q391, W173-Q391, A174-Q391, K175-Q391, L176-Q391, Y177-Q391, S178-Q391, L179-Q391, V180-Q391, I181-Q391, W182-Q391, G183-Q391, C184-Q391, T185-Q391, L186-Q391, L187-Q391, L188-Q391, S189-Q391, S190-Q391, P191-Q391, M192-Q391, L193-Q391, V194-Q391, F195-Q391, R196-Q391, T197-Q391, M198-Q391, K199-Q391, E200-Q391, Y201-Q391, S202-Q391, D203-Q391, E204-Q391, G205-Q391, H206-Q391, N207-Q391, V208-Q391, T209-Q391, A210-Q391, C211-Q391, V212-Q391, I213-Q391, S214-Q391, Y215-Q391, P216-Q391, S217-Q391, L218-Q391, I219-Q391, W220-Q391, E221-Q391, V222-Q391, F223-Q391, T224-Q391, N225-Q391, M226-Q391, L227-Q391, L228-Q391, N229-Q391, V230-Q391, V231-Q391, G232-Q391, F233-Q391, L234-Q391, L235-Q391, P236-Q391, L237-Q391, S238-Q391, V239-Q391, I240-Q391, T241-Q391, F242-Q391, C243-Q391, T244-Q391, M245-Q391, Q246-Q391, I247-Q391, M248-Q391, Q249-Q391, V250-Q391, L251-Q391, R252-Q391, N253-Q391, N254-Q391, E255-Q391, M256-Q391, Q257-Q391, K258-Q391, F259-Q391, K260-Q391, E261-Q391, I262-Q391, Q263-Q391, T264-Q391, E265-Q391, R266-Q391, R267-Q391, A268-Q391, T269-Q391, V270-Q391, L271-Q391, V272-Q391, L273-Q391, V274-Q391, V275-Q391, L276-Q391, L277-Q391, L278-Q391, F279-Q391, I280-Q391, I281-Q391, C282-Q391, W283-Q391, L284-Q391, P285-Q391, F286-Q391, Q287-Q391, I288-Q391, S289-Q391, T290-Q391, F291-Q391, L292-Q391, D293-Q391, T294-Q391, L295-Q391, H296-Q391, R297-Q391, L298-Q391, G299-Q391, I300-Q391, L301-Q391, S302-Q391, S303-Q391, C304-Q391, Q305-Q391, D306-Q391, E307-Q391, R308-Q391, I309-Q391, I310-Q391, D311-Q391, V312-Q391, I313-Q391, T314-Q391, Q315-Q391, I316-Q391, A317-Q391, S318-Q391, F319-Q391, M320-Q391, A321-Q391, Y322-Q391, S323-Q391, N324-Q391, S325-Q391, C326-Q391, L327-Q391, N328-Q391, P329-Q391, L330-Q391, V331-Q391, Y332-Q391, V333-Q391, I334-Q391, V335-Q391, G336-Q391, K337-Q391, R338-Q391, F339-Q391, R340-Q391, K341-Q391, K342-Q391, S343-Q391, W344-Q391, E345-Q391, V346-Q391, Y347-Q391, Q348-Q391, G349-Q391, V350-Q391, C351-Q391, Q352-Q391, K353-Q391, G354-Q391, G355-Q391, C356-Q391, R357-Q391, S358-Q391, E359-Q391, P360-Q391, I361-Q391, Q362-Q391, M363-Q391, E364-Q391, N365-Q391, S366-Q391, M367-Q391, G368-Q391, T369-Q391, L370-Q391, R371-Q391, T372-Q391, S373-Q391, I374-Q391, S375-Q391, V376-Q391, E377-Q391, R378-Q391, Q379-Q391, I380-Q391, H381-Q391, K382-Q391, L383-Q391, Q384-Q391, and/or D385-Q391 of SEQ ID NO:851. Polynucleotide sequences encoding these polypeptides are also provided. The present invention also encompasses the use of these N-terminal BDKRB2 (SNP_ID:AE104s31) deletion polypeptides as immunogenic and/or antigenic epitopes as described elsewhere herein.

[0336] In preferred embodiments, the following C-terminal BDKRB2 (SNP_ID:AE104s3 1) deletion polypeptides are encompassed by the present invention: M1-Q391, M1-R390, M1-S389, M1-G388, M1-A387, M1-W386, M1-D385, M1-Q384, M1-L383, M1-K382, M1-H381, M1-I380, M1-Q379, M1-R378, M1-E377, M1-V376, M1-S375, M1-I374, M1-S373, M1-T372, M1-R371, M1-L370, M1-T369, M1-G368, M1-M367, M1-S366, M1-N365, M1-E364, M1-M363, M1-Q362, M1-I361, M1-P360, M1-E359, M1-S358, M1-R357, M1-C356, M1-G355, M1-G354, M1-K353, M1-Q352, M1-C351, M1-V350, M1-G349, M1-Q348, M1-Y347, M1-V346, M1-E345, M1-W344, M1-S343, M1-K342, M1-K341, M1-R340, M1-F339, M1-R338, M1-K337, M1-G336, M1-V335, M1-I334, M1-V333, M1-Y332, M1-V331, M1-L330, M1-P329, M1-N328, M1-L327, M1-C326, M1-S325, M1-N324, M1-S323, M1-Y322, M1-A321, M1-M320, M1-F319, M1-S318, M1-A317, M1-I316, M1-Q315, M1-T314, M1-I313, M1-V312, M1-D311, M1-I310, M1-I309, M1-R308, M1-E307, M1-D306, M1-Q305, M1-C304, M1-S303, M1-S302, M1-L301, M1-I300, M1-G299, M1-L298, M1-R297, M1-H296, M1-L295, M1-T294, M1-D293, M1-L292, M1-F291, M1-T290, M1-S289, M1-I288, M1-Q287, M1-F286, M1-P285, M1-L284, M1-W283, M1-C282, M1-I281, M1-I280, M1-F279, M1-L278, M1-L277, M1-L276, M1-V275, M1-V274, M1-L273, M1-V272, M1-L271, M1-V270, M1-T269, M1-A268, M1-R267, M1-R266, M1-E265, M1-T264, M1-Q263, M1-I262, M1-E261, M1-K260, M1-F259, M1-K258, M1-Q257, M1-M256, M1-E255, M1-N254, M1-N253, M1-R252, M1-L251, M1-V250, M1-Q249, M1-M248, M1-I247, M1-Q246, M1-M245, M1-T244, M1-C243, M1-F242, M1-T241, M1-I240, M1-V239, M1-S238, M1-L237, M1-P236, M1-L235, M1-L234, M1-F233, M1-G232, M1-V231, M1-V230, M1-N229, M1-L228, M1-L227, M1-M226, M1-N225, M1-T224, M1-F223, M1-V222, M1-E221, M1-W220, M1-I219, M1-L218, M1-S217, M1-P216, M1-Y215, M1-S214, M1-I213, M1-V212, M1-C211, M1-A210, M1-T209, M1-V208, M1-N207, M1-H206, M1-G205, M1-E204, M1-D203, M1-S202, M1-Y201, M1-E200, M1-K199, M1-M198, M1-T197, M1-R196, M1-F195, M1-V194, M1-L193, M1-M192, M1-P191, M1-S190, M1-S189, M1-L188, M1-L187, M1-L186, M1-T185, M1-C184, M1-G183, M1-W182, M1-I181, M1-V180, M1-L179, M1-S178, M1-Y177, M1-L176, M1-K175, M1-A174, M1-W173, M1-R172, M1-V171, M1-G170, M1-R169, M1-M168, M1-R167, M1-G166, M1-M165, M1-S164, M1-M163, M1-T162, M1-K161, M1-V160, M1-L159, M1-A158, M1-L157, M1-Y156, M1-R155, M1-D154, M1-I153, M1-S152, M1-V151, M1-L150, M1-M149, M1-L148, M1-F147, M1-C146, M1-I145, M1-S144, M1-S143, M1-Y142, M1-L141, M1-N140, M1-M139, M1-S138, M1-I137, M1-I136, M1-A135, M1-N134, M1-V133, M1-V132, M1-R131, M1-C130, M1-L129, M1-T128, M1-E127, M1-G126, M1-F125, M1-L124, M1-W123, M1-D122, M1-F121, M1-N120, M1-N119, M1-S118, M1-I117, M1-T116, M1-I115, M1-A114, M1-W113, M1-F112, M1-P111, M1-L110, M1-G109, M1-C108, M1-A107, M1-L106, M1-I105, M1-L104, M1-D103, M1-A102, M1-A110, M1-A10, M1-L99, M1-N98, M1-G97, M1-L96, M1-Y95, M1-I94, M1-E93, M1-A92, M1-V91, M1-T90, M1-C89, M1-S88, M1-S87, M1-K86, M1-H85, M1-L84, M1-C83, M1-F82, M1-V81, M1-S80, M1-L79, M1-V78, M1-F77, M1-I76, M1-N75, M1-E74, M1-L73, M1-T72, M1-A71, M1-L70, M1-V69, M1-F68, M1-L67, M1-V66, M1-W65, M1-L64, M1-F63, M1-P62, M1-P61, M1-Q60, M1-I59, M1-T58, M1-N57, M1-L56, M1-W55, M1-G54, M1-L53, M1-W52, M1-E51, M1-V50, M1-Q49, M1-P48, M1-C47, M1-K46, M1-S45, M1-Q44, M1-A43, M1-F42, M1-T41, M1-G40, M1-N39, M1-L38, M1-T37, M1-P36, M1-G35, M1-Q34, M1-L33, M1-T32, M1-V31, M1-N30, M1-L29, M1-M28, M1-D27, M1-A26, M1-S25, M1-F24, M1-S23, M1-A22, M1-T21, M1-T20, M1-P19, M1-V18, M1-S17, M1-A16, M1-E15, M1-R14, M1-V13, M1-S12, M1-L11, M1-F10, M1-M9, M1-S8, and/or M1-17 of SEQ ID NO:851. Polynucleotide sequences encoding these polypeptides are also provided. The present invention also encompasses the use of these C-terminal BDKRB2 (SNP_ID:AE104s31) deletion polypeptides as immunogenic and/or antigenic epitopes as described elsewhere herein.

[0337] Alternatively, preferred polypeptides of the present invention may comprise polypeptide sequences corresponding to, for example, internal regions of the BDKRB2 (SNP_ID: AE104s31) polypeptide (e.g., any combination of both N- and C-terminal BDKRB2 (SNP_ID: AE104s3i) polypeptide deletions) of SEQ ID NO:851. For example, internal regions could be defined by the equation: amino acid NX to amino acid CX, wherein NX refers to any N-terminal deletion polypeptide amino acid of BDKRB2 (SNP_ID: AE104s31) (SEQ ID NO:851), and where CX refers to any C-terminal deletion polypeptide amino acid of BDKRB2 (SNP_ID: AE104s31) (SEQ ID NO:851). Polynucleotides encoding these polypeptides are also provided. The present invention also encompasses the use of these polypeptides as an immunogenic and/or antigenic epitope as described elsewhere herein. Preferably, the resulting deletion polypeptide comprises the polypeptide polymorphic loci identified elsewhere herein for BDKRB2 (SNP_ID: AE104s31), and more preferably comprises the polypeptide polymorphic allele identified elsewhere herein for BDKRB2 (SNP_ID: AE104s31).

[0338] Features of the Polypeptide Encoded by Gene No:26

[0339] The present invention relates to isolated nucleic acid molecules comprising, or alternatively, consisting of all or a portion of the variant allele of the human protease inhibitor 4 gene (e.g., wherein reference or wildtype protease inhibitor 4 gene is exemplified by SEQ ID NO:57 1). Preferred portions are at least 10, preferably at least 20, preferably at least 40, preferably at least 100, contiguous polynucleotides and comprise a “G” at the nucleotide position corresponding to nucleotide 1143 of the protease inhibitor 4 gene, or a portion of SEQ ID NO:852. Alternatively, preferred portions are at least 10, preferably at least 20, preferably at least 40, preferably at least 100, contiguous polynucleotides and comprise a “C” at the nucleotide position corresponding to nucleotide 1143 of the protease inhibitor 4 gene, or a portion of SEQ ID NO:852. The invention further relates to isolated gene products, e.g., polypeptides and/or proteins, which are encoded by a nucleic acid molecule comprising all or a portion of the variant allele of the protease inhibitor 4gene.

[0340] In one embodiment, the invention relates to a method for predicting the likelihood that an individual will have a disorder associated with a “G” at the nucleotide position corresponding to nucleotide position 1143 of SEQ ID NO:852 (or diagnosing or aiding in the diagnosis of such a disorder) comprising the steps of obtaining a DNA sample from an individual to be assessed and determining the nucleotide present at position 1143 of SEQ ID NO:852. The presence of a “G” at this position indicates that the individual has a greater likelihood of having a disorder associated therewith than an individual having a “C” at that position, or a greater likelihood of having more severe symptoms.

[0341] Conversely, the invention relates to a method for predicting the likelihood that an individual will have a disorder associated with a “C” at the nucleotide position corresponding to nucleotide position 1143 of SEQ ID NO:852 (or diagnosing or aiding in the diagnosis of such a disorder) comprising the steps of obtaining a DNA sample from an individual to be assessed and determining the nucleotide present at position 1143 of SEQ ID NO:852. The presence of a “C” at this position indicates that the individual has a greater likelihood of having a disorder associated therewith than an individual having a “G” at that position, or a greater likelihood of having more severe symptoms.

[0342] Representative disorders which may be detected, diagnosed, identified, treated, prevented, and/or ameliorated by the present invention include, the following, non-limiting diseases and disorders: angioedema, cardiovascular diseases, angina pectoris, hypertension, heart failure, myocardial infarction, ventricular hypertrophy, cough associated with ACE inhibitors, cough associated with vasopeptidase inhibitors, vascular diseases, miscrovascular disease, vascular leak syndrome, aneurysm, stroke, embolism, thrombosis, endothelial dysfunction, coronary artery disease, arteriosclerosis, and/or atherosclerosis.

[0343] Additional disorders which may be detected, diagnosed, identified, treated, prevented, and/or ameliorated by the present invention include, the following, non-limiting diseases and disorders: hypotensive reactions during blood transfusions (Transfusion. 1999 Oct;39(10):1084-8.), hypersensitivity reactions during hemodialysis (Peptides. 1999;20(4):421-30.), sepsis, inflammatory arthritis, and enterocolitis (Clin Rev Allergy Immunol. 1998 Winter;16(4):365-84.), enterocolitis (Gut. 1998 Sep;43(3):365-74.), chronic granulomatous intestinal and systemic inflammation (FASEB J. 1998 Mar;12(3):325-33.), peptidoglycan-induced arthritis (Arthritis Rheum. 1997 Jul;40(7):1327-33.), arthritis (Proc Assoc Am Physicians. 1997 Jan;109(1):10-22.), intestinal inflammation (Dig Dis Sci. 1996 May;41(5):912-20.), acute phase response of inflammation (Peptides. 1996; 17(7): 1163-70.), asthma (J Appl Physiol 1995; 78: 1844-1852), chronic obstructive pulmonary disease (COPD), cough reflex, allergies, and/or neurogenic inflammation.

[0344] Features of the Polypeptide Encoded by Gene No:27

[0345] The present invention relates to isolated nucleic acid molecules comprising, or alternatively, consisting of all or a portion of the variant allele of the human protease inhibitor 4 gene (e.g., wherein reference or wildtype protease inhibitor 4 gene is exemplified by SEQ ID NO:571). Preferred portions are at least 10, preferably at least 20, preferably at least 40, preferably at least 100, contiguous polynucleotides and comprise an “T” at the nucleotide position corresponding to nucleotide 412 of the protease inhibitor 4 gene, or a portion of SEQ ID NO:854. Alternatively, preferred portions are at least 10, preferably at least 20, preferably at least 40, preferably at least 100, contiguous polynucleotides and comprise a “C” at the nucleotide position corresponding to nucleotide 412 of the protease inhibitor 4 gene, or a portion of SEQ ID NO:854. The invention further relates to isolated gene products, e.g., polypeptides and/or proteins, which are encoded by a nucleic acid molecule comprising all or a portion of the variant allele of the protease inhibitor 4 gene.

[0346] In one embodiment, the invention relates to a method for predicting the likelihood that an individual will have a disorder associated with a “T” at the nucleotide position corresponding to nucleotide position 412 of SEQ ID NO:854 (or diagnosing or aiding in the diagnosis of such a disorder) comprising the steps of obtaining a DNA sample from an individual to be assessed and determining the nucleotide present at position 412 of SEQ ID NO:854. The presence of a “T” at this position indicates that the individual has a greater likelihood of having a disorder associated therewith than an individual having a “C” at that position, or a greater likelihood of having more severe symptoms.

[0347] Conversely, the invention relates to a method for predicting the likelihood that an individual will have a disorder associated with a “C” at the nucleotide position corresponding to nucleotide position 412 of SEQ ID NO:854 (or diagnosing or aiding in the diagnosis of such a disorder) comprising the steps of obtaining a DNA sample from an individual to be assessed and determining the nucleotide-present at position 412 of SEQ ID NO:854. The presence of a “C” at this position indicates that the individual has a greater likelihood of having a disorder associated therewith than an individual having a “T” at that position, or a greater likelihood of having more severe symptoms.

[0348] The present invention further relates to isolated proteins or polypeptides comprising, or alternatively, consisting of all or a portion of the encoded variant amino acid sequence of the human protease inhibitor 4 polypeptide (e.g., wherein reference or wildtype protease inhibitor 4 polypeptide is exemplified by SEQ ID NO:572). Preferred portions are at least 10, preferably at least 20, preferably at least 40, preferably at least 100, contiguous polypeptides and comprises an “C” at the amino acid position corresponding to amino acid 138 of the protease inhibitor 4 polypeptide, or a portion of SEQ ID NO:855. Alternatively, preferred portions are at least 10, preferably at least 20, preferably at least 40, preferably at least 100, contiguous polypeptides and comprises a “R” at the amino acid position corresponding to amino acid 138 of the protease inhibitor 4 protein, or a portion of SEQ ID NO:855. The invention further relates to isolated nucleic acid molecules encoding such polypeptides or proteins, as well as to antibodies that bind to such proteins or polypeptides.

[0349] Representative disorders which may be detected, diagnosed, identified, treated, prevented, and/or ameliorated by the present invention include, the following, non-limiting diseases and disorders: angioedema, cardiovascular diseases, angina pectoris, hypertension, heart failure, myocardial infarction, ventricular hypertrophy, cough associated with ACE inhibitors, cough associated with vasopeptidase inhibitors, vascular diseases, miscrovascular disease, vascular leak syndrome, aneurysm, stroke, embolism, thrombosis, endothelial dysfunction, coronary artery disease, arteriosclerosis, and/or atherosclerosis.

[0350] Additional disorders which may be detected, diagnosed, identified, treated, prevented, and/or ameliorated by the present invention include, the following, non-limiting diseases and disorders: hypotensive reactions during blood transfusions (Transfusion. 1999 Oct;39(10):1084-8.), hypersensitivity reactions during hemodialysis (Peptides. 1999;20(4):421-30.), sepsis, inflammatory arthritis, and enterocolitis (Clin Rev Allergy Immunol. 1998 Winter;16(4):365-84.), enterocolitis (Gut. 1998 Sep;43(3):365-74.), chronic granulomatous intestinal and systemic inflammation (FASEB J. 1998 Mar;12(3):325-33.), peptidoglycan-induced arthritis (Arthritis Rheum. 1997 Jul;40(7):1327-33.), arthritis (Proc Assoc Am Physicians. 1997 Jan;109(1):10-22.), intestinal inflammation (Dig Dis Sci. 1996 May;41(5):912-20.), acute phase response of inflammation (Peptides. 1996; 17(7): 1163-70.), asthma (J Appl Physiol 1995; 78: 1844-1852), chronic obstructive pulmonary disease (COPD), cough reflex, allergies, and/or neurogenic inflammation.

[0351] In preferred embodiments, the following N-terminal SERPINA4 (SNP_ID:AE110s11) deletion polypeptides are encompassed by the present invention: M1-P427, H2-P427, L3-P427, 14-P427, D5-P427, Y6-P427, L7-P427, L8-P427, L9-P427, L10-P427, L11-P427, V12-P427, G13-P427, L14-P427, L15-P427, A16-P427, L17-P427, S18-P427, H19-P427, G20-P427, Q21-P427, L22-P427, H23-P427, V24-P427, E25-P427, H26-P427, D27-P427, G28-P427, E29-P427, S30-P427, C31-P427, S32-P427, N33-P427, S34-P427, S35-P427, H36-P427, Q37-P427, Q38-P427, I39-P427, L40-P427, E41-P427, T42-P427, G43-P427, E44-P427, G45-P427, S46-P427, P47-P427, S48-P427, L49-P427, K50-P427, 151-P427, A52-P427, P53-P427, A54-P427, N55-P427, A56-P427, D57-P427, F58-P427, A59-P427, F60-P427, R61-P427, F62-P427, Y63-P427, Y64-P427, L65-P427, 166-P427, A67-P427, S68-P427, E69-P427, T70-P427, P71-P427, G72-P427, K73-P427, N74-P427, 175-P427, F76-P427, F77-P427, S78-P427, P79-P427, L80-P427, S81-P427, 182-P427, S83-P427, A84-P427, A85-P427, Y86-P427, A87-P427, M88-P427, L89-P427, S90-P427, L91-P427, G92-P427, A93-P427, C94-P427, S95-P427, H96-P427, S97-P427, R98-P427, S99-P427, Q100-P427, I101-P427, L102-P427, E103-P427, G104-P427, L105-P427, G106-P427, F107-P427, N108-P427, L109-P427, T110-P427, E111-P427, L112-P427, S113-P427, E114-P427, S115-P427, D116-P427, V117-P427, H118-P427, R119-P427, G120-P427, F121-P427, Q122-P427, H123-P427, L124-P427, L125-P427, H126-P427, T127-P427, L128-P427, N129-P427, L130-P427, P131-P427, G132-P427, H133-P427, G134-P427, L135-P427, E136-P427, T137-P427, C138-P427, V139-P427, G140-P427, S141-P427, A142-P427, L143-P427, F144-P427, L145-P427, S146-P427, H147-P427, N148-P427, L149-P427, K150-P427, F151-P427, L152-P427, A153-P427, K154-P427, F155-P427, L156-P427, N157-P427, D158-P427, T159-P427, M160-P427, A161-P427, V162-P427, Y163-P427, E164-P427, A165-P427, K166-P427, L167-P427, F168-P427, H169-P427, T170-P427, N171-P427, F172-P427, Y173-P427, D174-P427, T175-P427, V176-P427, G177-P427, T178-P427, I179-P427, Q180-P427, L181-P427, I182-P427, N183-P427, D184-P427, H185-P427, V186-P427, K187-P427, K188-P427, E189-P427, T190-P427, R191-P427, G192-P427, K193-P427, I194-P427, V195-P427, D196-P427, L197-P427, V198-P427, S199-P427, E200-P427, L201-P427, K202-P427, K203-P427, D204-P427, V205-P427, L206-P427, M207-P427, V208-P427, L209-P427, V210-P427, N211-P427, Y212-P427, I213-P427, Y214-P427, F215-P427, K216-P427, A217-P427, L218-P427, W219-P427, E220-P427, K221-P427, P222-P427, F223-P427, I224-P427, S225-P427, S226-P427, R227-P427, T228-P427, T229-P427, P230-P427, K231-P427, D232-P427, F233-P427, Y234-P427, V235-P427, D236-P427, E237-P427, N238-P427, T239-P427, T240-P427, V241-P427, R242-P427, V243-P427, P244-P427, M245-P427, M246-P427, L247-P427, Q248-P427, D249-P427, Q250-P427, E251-P427, H252-P427, H253-P427, W254-P427, Y255-P427, L256-P427, H257-P427, D258-P427, R259-P427, Y260-P427, L261-P427, P262-P427, C263-P427, S264-P427, V265-P427, L266-P427, R267-P427, M268-P427, D269-P427, Y270-P427, K271-P427, G272-P427, D273-P427, A274-P427, T275-P427, V276-P427, F277-P427, F278-P427, I279-P427, L280-P427, P281-P427, N282-P427, Q283-P427, G284-P427, K285-P427, M286-P427, R287-P427, E288-P427, I289-P427, E290-P427, E291-P427, V292-P427, L293-P427, T294-P427, P295-P427, E296-P427, M297-P427, L298-P427, M299-P427, R300-P427, W301-P427, N302-P427, N303-P427, L304-P427, L305-P427, R306-P427, K307-P427, R308-P427, N309-P427, F310-P427, Y311-P427, K312-P427, K313-P427, L314-P427, E315-P427, L316-P427, H317-P427, L318-P427, P319-P427, K320-P427, F321-P427, S322-P427, I323-P427, S324-P427, G325-P427, S326-P427, Y327-P427, V328-P427, L329-P427, D330-P427, Q331-P427, I332-P427, L333-P427, P334-P427, R335-P427, L336-P427, G337-P427, F338-P427, T339-P427, D340-P427, L341-P427, F342-P427, S343-P427, K344-P427, W345-P427, A346-P427, D347-P427, L348-P427, S349-P427, G350-P427, I351-P427, T352-P427, K353-P427, Q354-P427, Q355-P427, K356-P427, L357-P427, E358-P427, A359-P427, S360-P427, K361-P427, S362-P427, F363-P427, H364-P427, K365-P427, A366-P427, T367-P427, L368-P427, D369-P427, V370-P427, D371-P427, E372-P427, A373-P427, G374-P427, T375-P427, E376-P427, A377-P427, A378-P427, A379-P427, A380-P427, T381-P427, T382-P427, F383-P427, A384-P427, I385-P427, K386-P427, F387-P427, F388-P427, S389-P427, A390-P427, Q391-P427, T392-P427, N393-P427, R394-P427, H395-P427, I396-P427, L397-P427, R398-P427, F399-P427, N400-P427, R401-P427, P402-P427, F403-P427, L404-P427, V405-P427, V406-P427, I407-P427, F408-P427, S409-P427, T410-P427, S411-P427, T412-P427, Q413-P427, S414-P427, V415-P427, L416-P427, F417-P427, L418-P427, G419-P427, K420-P427, and/or V421-P427 of SEQ ID NO:855. Polynucleotide sequences encoding these polypeptides are also provided. The present invention also encompasses the use of these N-terminal SERPINA4 (SNP_ID:ABE110s11) deletion polypeptides as immunogenic and/or antigenic epitopes as described elsewhere herein.

[0352] In preferred embodiments, the following C-terminal SERPINA4 (SNP_ID:AE110s11) deletion polypeptides are encompassed by the present invention: M1-P427, M1-K426, M1-T425, M1-P424, M1-D423, M1-V422, M1-V421, M1-K420, M1-G419, M1-L418, M1-F417, M1-L416, M1-V415, M1-S414, M1-Q413, M1-T412, M1-S411, M1-T410, M1-S409, M1-F408, M1-I407, M1-V406, M1-V405, M1-L404, M1-F403, M1-P402, M1-R401, M1-N400, M1-F399, M1-R398, M1-L397, M1-I396, M1-H395, M1-R394, M1-N393, M1-T392, M1-Q391, M1-A390, M1-S389, M1-F388, M1-F387, M1-K386, M1-I385, M1-A384, M1-F383, M1-T382, M1-T381, M1-A380, M1-A379, M1-A378, M1-A377, M1-E376, M1-T375, M1-G374, M1-A373, M1-E372, M1-D371, M1-V370, M1-D369, M1-L368, M1-T367, M1-A366, M1-K365, M1-H364, M1-F363, M1-S362, M1-K361, M1-S360, M1-A359, M1-E358, M1-L357, M1-K356, M1-Q355, M1-Q354, M1-K353, M1-T352, M1-I351, M1-G350, M1-S349, M1-L348, M1-D347, M1-A346, M1-W345, M1-K344, M1-S343, M1-F342, M1-L341, M1-D340, M1-T339, M1-F338, M1-G337, M1-L336, M1-R335, M1-P334, M1-L333, M1-I332, M1-Q331, M1-D330, M1-L329, M1-V328, M1-Y327, M1-S326, M1-G325, M1-S324, M1-I323, M1-S322, M1-F321, M1-K320, M1-P319, M1-L318, M1-H317, M1-L316, M1-E315, M1-L314, M1-K313, M1-K312, M1-Y311, M1-F310, M1-N309, M1-R308, M1-K307, M1-R306, M1-L305, M1-L304, M1-N303, M1-N302, M1-W301, M1-R300, M1-M299, M1-L298, M1-M297, M1-E296, M1-P295, M1-T294, M1-L293, M1-V292, M1-E291, M1-E290, M1-I289, M1-E288, M1-R287, M1-M286, M1-K285, M1-G284, M1-Q283, M1-N282, M1-P281, M1-L280, M1-I279, M1-F278, M1-F277, M1-V276, M1-T275, M1-A274, M1-D273, M1-G272, M1-K271, M1-Y270, M1-D269, M1-M268, M1-R267, M1-L266, M1-V265, M1-S264, M1-C263, M1-P262, M1-L261, M1-Y260, M1-R259, M1-D258, M1-H257, M1-L256, M1-Y255, M1-W254, M1-H253, M1-H252, M1-E251, M1-Q250, M1-D249, M1-Q248, M1-L247, M1-M246, M1-M245, M1-P244, M1-V243, M1-R242, M1-V241, M1-T240, M1-T239, M1-N238, M1-E237, M1-D236, M1-V235, M1-Y234, M1-F233, M1-D232, M1-K231, M1-P230, M1-T229, M1-T228, M1-R227, M1-S226, M1-S225, M1-I224, M1-F223, M1-P222, M1-K221, M1-E220, M1-W219, M1-L218, M1-A217, M1-K216, M1-F215, M1-Y214, M1-I213, M1-Y212, M1-N211, M1-V210, M1-L209, M1-V208, M1-M207, M1-L206, M1-V205, M1-D204, M1-K203, M1-K202, M1-L201, M1-E200, M1-S199, M1-V198, M1-L197, M1-D196, M1-V195, M1-I194, M1-K193, M1-G192, M1-R191, M1-T190, M1-E189, M1-K188, M1-K187, M1-V186, M1-H185, M1-D184, M1-N183, M1-I182, M1-L181, M1-Q180, M1-I179, M1-T178, M1-G177, M1-V176, M1-T175, M1-D174, M1-Y173, M1-F172, M1-N171, M1-T170, M1-H169, M1-F168, M1-L167, M1-K166, M1-A165, M1-E164, M1-Y163, M1-V162, M1-A161, M1-M160, M1-T159, M1-D158, M1-N157, M1-L156, M1-F155, M1-K154, M1-A153, M1-L152, M1-F151, M1-K150, M1-L149, M1-N148, M1-H147, M1-S146, M1-L145, M1-F144, M1-L143, M1-A142, M1-S141, M1-G140, M1-V139, M1-C138, M1-T137, M1-E136, M1-L135, M1-G134, M1-H133, M1-G132, M1-P131, M1-L130, M1-N129, M1-L128, M1-T127, M1-H126, M1-L125, M1-L124, M1-H123, M1-Q122, M1-F121, M1-G120, M1-R119, M1-H118, M1-V117, M1-D116, M1-S115, M1-E114, M1-S113, M1-L112, M1-E111, M1-T110, M1-L109, M1-N108, M1-F107, M1-G106, M1-L105, M1-G104, M1-E103, M1-L102, M1-I101, M1-Q100, M1-S99, M1-R98, M1-S97, M1-H96, M1-S95, M1-C94, M1-A93, M1-G92, M1-L91, M1-S90, M1-L89, M1-M88, M1-A87, M1-Y86, M1-A85, M1-A84, M1-S83, M1-182, M1-S81, M1-L80, M1-P79, M1-S78, M1-F77, M1-F76, M1-175, M1-N74, M1-K73, M1-G72, M1-P71, M1-T70, M1-E69, M1-S68, M1-A67, M1-166, M1-L65, M1-Y64, M1-Y63, M1-F62, M1-R61, M1-F60, M1-A59, M1-F58, M1-D57, M1-A56, M1-N55, M1-A54, M1-P53, M1-A52, M1-I51, M1-K50, M1-L49, M1-S48, M1-P47, M1-S46, M1-G45, M1-E44, M1-G43, M1-T42, M1-E41, M1-L40, M1-139, M1-Q38, M1-Q37, M1-H36, M1-S35, M1-S34, M1-N33, M1-S32, M1-C31, M1-S30, M1-E29, M1-G28, M1-D27, M1-H26, M1-E25, M1-V24, M1-H23, M1-L22, M1-Q21, M1-G20, M1-H19, M1-S18, M1-L17, M1-A16, M1-L15, M1-L14, M1-G13, M1-V12, M1-L11, M1-L10, M1-L9, M1-L8, and/or M1-L7 of SEQ ID NO:855. Polynucleotide sequences encoding these polypeptides are also provided. The present invention also encompasses the use of these C-terminal SERPINA4 (SNP_ID:AE110s11) deletion polypeptides as immunogenic and/or antigenic epitopes as described elsewhere herein.

[0353] Alternatively, preferred polypeptides of the present invention may comprise polypeptide sequences corresponding to, for example, internal regions of the SERPINA4 (SNP_ID:AE110s 1l) polypeptide (e.g., any combination of both N- and C- terminal SERPINA4 (SNP_ID:AE110s11) polypeptide deletions) of SEQ ID NO:855. For example, internal regions could be defined by the equation: amino acid NX to amino acid CX, wherein NX refers to any N-terminal deletion polypeptide amino acid of SERPINA4 (SNP_ID:AE110s11) (SEQ ID NO:855), and where CX refers to any C-terminal deletion polypeptide amino acid of SERPINA4 (SNP_ID:AE110s11) (SEQ ID NO:855). Polynucleotides encoding these polypeptides are also provided. The present invention also encompasses the use of these polypeptides as an immunogenic and/or antigenic epitope as described elsewhere herein. Preferably, the resulting deletion polypeptide comprises the polypeptide polymorphic loci identified elsewhere herein for SERPINA4 (SNP_ID:AE110s11), and more preferably comprises the polypeptide polymorphic allele identified elsewhere herein for SERPINA4 (SNP_ID:AE110s11).

TABLE I

| | | | | NT | | 5′ NT of | 3′ | AA | |
|---|---|---|---|---|---|---|---|---|---|
| | CDNA | | | SEQ | Total NT | Start | NT | Seq | Total |
| Gene | NAME/ | NT Poly- | AA Poly- | ID. No. | Seq of | Codon of | of | ID No. | AA of |
| No. | SNP_ID | morphism | morphism | X | Clone | ORF | ORF | Y | ORF |
| 1. | XPNPEP2/ | C2085G | N/A | 3 | 3428 | 265 | 2283 | 4 | 673 |
| | AE100s1 | | | | | | | | |
| 2. | BDKRB1/ | G956A | R317Q | 7 | 1082 | 7 | 1065 | 8 | 353 |
| | AE103s1 | | | | | | | | |
| 3. | BDKRB1/ | G129A | N/A | 9 | 1082 | 7 | 1065 | 10 | 353 |
| | AE103s2 | | | | | | | | |
| 4. | TACR1/ | A543G | N/A | 15 | 1766 | 211 | 1431 | 16 | 407 |
| | AE106s1 | | | | | | | | |
| 5. | TACR1/ | G672T | N/A | 17 | 1766 | 211 | 1431 | 18 | 407 |
| | AE106s2 | | | | | | | | |
| 6. | TACR1/ | C1344T | N/A | 19 | 1766 | 211 | 1431 | 20 | 407 |
| | AE106s2 | | | | | | | | |
| 7. | C1NH/ | C1278T | N/A | 23 | 1826 | 61 | 1560 | 24 | 500 |
| | AE105s3 | | | | | | | | |
| 8. | C1NH/ | T227C | V56A | 25 | 1826 | 61 | 1560 | 26 | 500 |
| | AE105s4 | | | | | | | | |
| 9. | C1NH/ | C536G | A159G | 27 | 1826 | 61 | 1560 | 28 | 500 |
| | AE105s5 | | | | | | | | |
| 10. | C1NH/ | G1498A | V480M | 29 | 1826 | 61 | 1560 | 30 | 500 |
| | AE105s6 | | | | | | | | |
| 11. | KLK1/ | A592G | K145E | 33 | 871 | 37 | 822 | 34 | 262 |
| | AE107s1 | | | | | | | | |
| 12. | KLK1/ | G469C | E186Q | 35 | 871 | 37 | 822 | 36 | 262 |
| | AE107s3 | | | | | | | | |
| 13. | BDKRB1/ | C348T | N/A | 555 | 1082 | 7 | 1065 | 556 | 353 |
| | AE103s6 | | | | | | | | |
| 14. | BDKRB1/ | G462A | N/A | 557 | 1082 | 7 | 1065 | 558 | 353 |
| | AE103s7 | | | | | | | | |
| 15. | BDKRB1/ | C577G | L191V | 559 | 1082 | 7 | 1065 | 560 | 353 |
| | AE103s8 | | | | | | | | |
| 16. | BDKRB1/ | G706A | E233K | 561 | 1082 | 7 | 1065 | 562 | 353 |
| | AE103s9 | | | | | | | | |
| 17. | BDKRB2/ | C40T | R14C | 563 | 3733 | 1 | 1173 | 564 | 391 |
| | AE104s19 | | | | | | | | |
| 18. | BDKRB2/ | T933C | N/A | 565 | 3733 | 1 | 1173 | 566 | 391 |
| | AE104s24 | | | | | | | | |
| 19. | BDKRB2/ | G1061A | G354E | 567 | 3733 | 1 | 1173 | 568 | 391 |
| | AE104s25 | | | | | | | | |
| 20. | SERPINA4/ | C699T | N/A | 573 | 1281 | 1 | 1284 | 574 | 427 |
| | AE110s2 | | | | | | | | |
| 21. | SERPINA4/ | T597C | N/A | 575 | 1281 | 1 | 1284 | 576 | 427 |
| | AE110s5 | | | | | | | | |
| 22. | ACE2/ | T2173C | N/A | 842 | 3405 | 104 | 2518 | 843 | 805 |
| | AE109s7 | | | | | | | | |
| 23. | XPNPEP2/ | T711C | N/A | 846 | 3428 | 265 | 2283 | 847 | 673 |
| | AE100s30 | | | | | | | | |
| 24. | BDKRB1/ | G728A | R241Q | 848 | 1082 | 7 | 1065 | 849 | 353 |
| | AE103s10 | | | | | | | | |
| 25. | BDKRB2/ | A47C | D16A | 850 | 3733 | 1 | 1173 | 851 | 391 |
| | AE104s31 | | | | | | | | |
| 26. | SERPINA4/ | C1143G | N/A | 852 | 1281 | 1 | 1284 | 853 | 427 |
| | AE110s10 | | | | | | | | |
| 27. | SERPINA4/ | C412T | R138C | 854 | 1281 | 1 | 1284 | 855 | 427 |
| | AE110s11 | | | | | | | | |

[0354] Table I summarizes the information corresponding to each “Gene No.” described above. The nucleotide sequence identified as “NT SEQ ID NO:X” refers to the complete cDNA of the nucleotide comprising at least one polymorphism of the present invention and was identified using the methods described elsewhere herein, resulting in a final sequence identified as SEQ ID NO:X.

[0355] “cDNA Name/SNP_ID” refers to the accepted name of the wild type gene according to the HUGO Gene Nomenclature Committee, while the “SNP_ID” identifies the novel polymorphism provided as described in Tables IV, V, and VI, and the Examples herein. The SNP_ID uniquely identifies the novel SNPs of the present invention, and likewise the novel polynucleotide and polypeptides of the present invention which comprise these SNPs. The inclusion of the cDNA Name is provided for reference.

[0356] “NT Polymorphism” describes the specific nucleotide location within the coding region of each polynucleotide sequence of the present invention, in addition to the reference and variable nucleotides at that position. The format of this designation is as follows: R-N-A, where “N” refers to the nucleotide position of the polymorphism as shown in the Sequence Listing and/or Figures herein, the nucleotide provided in the “R” position refers to the reference nucleotide at the “N” position, while the nucleotide provided in the “A” position refers to the variable nucleotide at the “N” position.

[0357] “AA Polymorphism” describes the specific amino acid location within the encoded polypeptide sequence of the present invention, in addition to the reference and variable amino acids at that position. The format of this designation is as follows: R-N-A, where “N” refers to the amino acid position of the encoded polymorphism as shown in the Sequence Listing and/or Figures herein, the amino acid provided in the “R” position refers to the reference amino acid at the “N” position, while the amino acid provided in the “A” position refers to the variable amino acid at the “N” position.

[0358] “Total NT Seq. Of Clone” refers to the total number of nucleotides in the clone identified by “Gene No.” The nucleotide position of SEQ ID NO:X of the putative start codon (methionine) is identified as “5′ NT of Start Codon of ORF.”

[0359] The translated amino acid sequence, beginning with the methionine, is identified as “AA SEQ ID NO:Y,” although other reading frames can also be easily translated using known molecular biology techniques. The polypeptides produced by these alternative open reading frames are specifically contemplated by the present invention.

[0360] The total number of amino acids within the open reading frame of SEQ ID NO:Y is identified as “Total AA of ORF”. SEQ ID NO:X (where X may be any of the polynucleotide sequences disclosed in the sequence listing) and the translated SEQ ID NO:Y (where Y may be any of the polypeptide sequences disclosed in the sequence listing) are sufficiently accurate and otherwise suitable for a variety of uses well known in the art and described further herein. For instance, SEQ ID NO:X is useful for designing nucleic acid hybridization probes that will detect nucleic acid sequences contained in SEQ ID NO:X. These probes will also hybridize to nucleic acid molecules in biological samples, thereby enabling a variety of forensic and diagnostic methods of the invention. Similarly, polypeptides identified from SEQ ID NO:Y may be used, for example, to generate antibodies which bind specifically to proteins containing the polypeptides and the proteins encoded by the cDNA clones identified in Table I.

[0361] Nevertheless, DNA sequences generated by sequencing reactions can contain sequencing errors. The errors exist as misidentified nucleotides, or as insertions or deletions of nucleotides in the generated DNA sequence. The erroneously inserted or deleted nucleotides may cause frame shifts in the reading frames of the predicted amino acid sequence. In these cases, the predicted amino acid sequence diverges from the actual amino acid sequence, even though the generated DNA sequence may be greater than 99.9% identical to the actual DNA sequence (for example, one base insertion or deletion in an open reading frame of over 1000 bases).

[0362] Accordingly, for those applications requiring precision in the nucleotide sequence or the amino acid sequence, the present invention provides the generated nucleotide sequence identified as SEQ ID NO:X and the predicted translated amino acid sequence identified as SEQ ID NO:Y, as set forth in Table I. Moreover, the amino acid sequence of the protein encoded by a particular clone can also be directly determined by peptide sequencing or by collecting the protein, and determining its sequence.

[0363] The present invention also relates to the genes corresponding to SEQ ID NO:X, SEQ ID NO:Y. The corresponding gene can be isolated in accordance with known methods using the sequence information disclosed herein. Such methods include preparing probes or primers from the disclosed sequence and identifying or amplifying the corresponding gene from appropriate sources of genomic material.

[0364] Also provided in the present invention are species homologs, allelic variants, and/or orthologs. The skilled artisan could, using procedures well-known in the art, obtain the polynucleotide sequence corresponding to full-length genes (including, but not limited to the full-length coding region), allelic variants, splice variants, orthologs, and/or species homologues of genes corresponding to SEQ ID NO:X, SEQ ID NO:Y. For example, allelic variants and/or species homologues may be isolated and identified by making suitable probes or primers which correspond to the 5′, 3′, or internal regions of the sequences provided herein and screening a suitable nucleic acid source for allelic variants and/or the desired homologue.

[0365] The polypeptides of the invention can be prepared in any suitable manner. Such polypeptides include isolated naturally occurring polypeptides, recombinantly produced polypeptides, synthetically produced polypeptides, or polypeptides produced by a combination of these methods. Means for preparing such polypeptides are well understood in the art.

[0366] The polypeptides may be in the form of the protein, or may be a part of a larger protein, such as a fusion protein (see below). It is often advantageous to include an additional amino acid sequence which contains secretory or leader sequences, pro-sequences, sequences which aid in purification, such as multiple histidine residues, or an additional sequence for stability during recombinant production.

[0367] The polypeptides of the present invention are preferably provided in an isolated form, and preferably are substantially purified. A recombinantly produced version of a polypeptide, can be substantially purified using techniques described herein or otherwise known in the art, such as, for example, by the one-step method described in Smith and Johnson, Gene 67:31-40 (1988). Polypeptides of the invention also can be purified from natural, synthetic or recombinant sources using protocols described herein or otherwise known in the art, such as, for example, antibodies of the invention raised against the full-length form of the protein.

[0368] The present invention provides a polynucleotide comprising, or alternatively consisting of, the sequence identified as SEQ ID NO:X. The present invention also provides a polypeptide comprising, or alternatively consisting of, the sequence identified as SEQ ID NO:Y. The present invention also provides polynucleotides encoding a polypeptide comprising, or alternatively consisting of the polypeptide sequence of SEQ ID NO:Y.

[0369] Preferably, the present invention is directed to a polynucleotide comprising, or alternatively consisting of, the sequence identified as SEQ ID NO:X, that is less than, or equal to, a polynucleotide sequence that is 5 mega basepairs, 1 mega basepairs, 0.5 mega basepairs, 0.1 mega basepairs, 50,000 basepairs, 20,000 basepairs, or 10,000 basepairs in length.

[0370] The present invention encompasses polynucleotides with sequences complementary to those of the polynucleotides of the present invention disclosed herein. Such sequences may be complementary to the sequence disclosed as SEQ ID NO:X, and/or the nucleic acid sequence encoding the sequence disclosed as SEQ ID NO:Y.

[0371] The present invention also encompasses polynucleotides capable of hybridizing, preferably under reduced stringency conditions, more preferably under stringent conditions, and most preferably under highly stringent conditions, to polynucleotides described herein. Examples of stringency conditions are shown in Table II below: highly stringent conditions are those that are at least as stringent as, for example, conditions A-F; stringent conditions are at least as stringent as, for example, conditions G-L; and reduced stringency conditions are at least as stringent as, for example, conditions M-R.

TABLE II

| | | | Hybridization | |
|---|---|---|---|---|
| | Polynucleotide | Hybrid Length | Temperature | Wash Temperature |
| Stringency Condition | Hybrid± | (bp)‡ | and Buffer† | and Buffer† |
| A | DNA:DNA | > or equal to | 65° C.; 1xSSC - | 65° C.; |
| | | 50 | or- 42° C.; | 0.3xSSC |
| | | | 1xSSC, 50% | |
| | | | formamide | |
| B | DNA:DNA | <50 | Tb*; 1xSSC | Tb*; 1xSSC |
| C | DNA:RNA | > or equal to | 67° C.; 1xSSC - | 67° C.; |
| | | 50 | or- 45° C.; | 0.3xSSC |
| | | | 1xSSC, 50% | |
| | | | formamide | |
| D | DNA:RNA | <50 | Td*; 1xSSC | Td*; 1xSSC |
| E | RNA:RNA | > or equal to | 70° C.; 1xSSC - | 70° C.; |
| | | 50 | or- 50° C.; | 0.3xSSC |
| | | | 1xSSC, 50% | |
| | | | formamide | |
| F | RNA:RNA | <50 | Tf*; 1xSSC | Tf*; 1xSSC |
| G | DNA:DNA | > or equal to | 65° C.; 4xSSC - | 65° C.; 1xSSC |
| | | 50 | or- 45° C.; | |
| | | | 4xSSC, 50% | |
| | | | formamide | |
| H | DNA:DNA | <50 | Th*; 4xSSC | Th*; 4xSSC |
| I | DNA:RNA | > or equal to | 67° C.; 4xSSC - | 67° C.; 1xSSC |
| | | 50 | or- 45° C.; | |
| | | | 4xSSC, 50% | |
| | | | formamide | |
| J | DNA:RNA | <50 | Tj*; 4xSSC | Tj*; 4xSSC |
| K | RNA:RNA | > or equal to | 70° C.; 4xSSC - | 67° C.; 1xSSC |
| | | 50 | or- 40° C.; | |
| | | | 6xSSC, 50% | |
| | | | formamide | |
| L | RNA:RNA | <50 | Tl*; 2xSSC | Tl*; 2xSSC |
| M | DNA:DNA | > or equal to | 50° C.; 4xSSC - | 50° C.; 2xSSC |
| | | 50 | or- 40° C. | |
| | | | 6xSSC, 50% | |
| | | | formamide | |
| N | DNA:DNA | <50 | Tn*; 6xSSC | Tn*; 6xSSC |
| O | DNA:RNA | > or equal to | 55° C.; 4xSSC - | 55° C.; 2xSSC |
| | | 50 | or- 42° C.; | |
| | | | 6xSSC, 50% | |
| | | | formamide | |
| P | DNA:RNA | <50 | Tp*; 6xSSC | Tp*; 6xSSC |
| Q | RNA:RNA | > or equal to | 60° C.; 4xSSC - | 60° C.; 2xSSC |
| | | 50 | or- 45° C.; | |
| | | | 6xSSC, 50% | |
| | | | formamide | |
| R | RNA:RNA | <50 | Tr*; 4xSSC | Tr*; 4xSSC |

[0372] The “hybrid length” is the anticipated length for the hybridized region(s) of the hybridizing polynucleotides. When hybridizing a polynucleotide of unknown sequence, the hybrid is assumed to be that of the hybridizing polynucleotide of the present invention. When polynucleotides of known sequence are hybridized, the hybrid length can be determined by aligning the sequences of the polynucleotides and identifying the region or regions of optimal sequence complementarity. Methods of aligning two or more polynucleotide sequences and/or determining the percent identity between two polynucleotide sequences are well known in the art (e.g., MegAlign program of the DNA*Star suite of programs, etc).

[0373] SSPE (1×SSPE is 0.15M NaCl, 10 mM NaH2PO4, and 1.25 mM EDTA, pH 7.4) can be substituted for SSC (1×SSC is 0.15 M NaCl and 15 mM sodium citrate) in the hybridization and wash buffers; washes are performed for 15 minutes after hybridization is complete. The hydridizations and washes may additionally include 5X Denhardt's reagent, 0.5-1.0% SDS, 10 ug/ml denatured, fragmented salmon sperm DNA, 0.5% sodium pyrophosphate, and up to 50% formamide.

[0374] Tb - Tr: The hybridization temperature for hybrids anticipated to be less than 50 base pairs in length should be 5-10° C. less than the melting temperature Tm of the hybrids there Tm is determined according to the following equations. For hybrids less than 18 base pairs in length, Tm(°C.)=2(# of A+T bases)+4(# of G+C bases). For hybrids between 18 and 49 base pairs in length, Tm(°C.)=81.5+16.6(log₁₀[Na+])+0.41(%G+C)−(600/N), where N is the number of bases in the hybrid, and [Na+] is the concentration of sodium ions in the hybridization buffer ([NA+] for 1×SSC=0.165 M).

[0375] The present invention encompasses the substitution of any one, or more DNA or RNA hybrid partners with either a PNA, or a modified polynucleotide. Such modified polynucleotides are known in the art and are more particularly described elsewhere herein.

[0376] Additional examples of stringency conditions for polynucleotide hybridization are provided, for example, in Sambrook, J., E. F. Fritsch, and T. Maniatis, 1989, Molecular Cloning: A Laboratory Manual, Cold Spring Harbor Laboratory Press, Cold Spring Harbor, N.Y., chapters 9 and 11, and Current Protocols in Molecular Biology, 1995, F. M., Ausubel et al., eds, John Wiley and Sons, Inc., sections 2.10 and 6.3-6.4, which are hereby incorporated by reference herein.

[0377] Preferably, such hybridizing polynucleotides have at least 70% sequence identity (more preferably, at least 80% identity; and most preferably at least 90% or 95% identity) with the polynucleotide of the present invention to which they hybridize, where sequence identity is determined by comparing the sequences of the hybridizing polynucleotides when aligned so as to maximize overlap and identity while minimizing sequence gaps. The determination of identity is well known in the art, and discussed more specifically elsewhere herein.

[0378] The invention encompasses the application of PCR methodology to the polynucleotide sequences of the present invention, and/or the cDNA encoding the polypeptides of the present invention. PCR techniques for the amplification of nucleic acids are described in U.S. Pat. No. 4,683,195 and Saiki et al., Science, 239:487-491 (1988). PCR, for example, may include the following steps, of denaturation of template nucleic acid (if double-stranded), annealing of primer to target, and polymerization. The nucleic acid probed or used as a template in the amplification reaction may be genomic DNA, cDNA, RNA, or a PNA. PCR may be used to amplify specific sequences from genomic DNA, specific RNA sequence, and/or cDNA transcribed from mRNA. References for the general use of PCR techniques, including specific method parameters, include Mullis et al., Cold Spring Harbor Symp. Quant. Biol., 51:263, (1987), Ehrlich (ed), PCR Technology, Stockton Press, N.Y., 1989; Ehrlich et al., Science, 252:1643-1650, (1991); and “PCR Protocols, A Guide to Methods and Applications”, Eds., Innis et al., Academic Press, New York, (1990).

[0379] Signal Sequences

[0380] The present invention also encompasses mature forms of the polypeptide comprising, or alternatively consisting of, the polypeptide sequence of SEQ ID NO:Y, the polypeptide encoded by the polynucleotide described as SEQ ID NO:X. The present invention also encompasses polynucleotides encoding mature forms of the present invention, such as, for example the polynucleotide sequence of SEQ ID NO:X.

[0381] According to the signal hypothesis, proteins secreted by eukaryotic cells have a signal or secretary leader sequence which is cleaved from the mature protein once export of the growing protein chain across the rough endoplasmic reticulum has been initiated. Most eukaryotic cells cleave secreted proteins with the same specificity. However, in some cases, cleavage of a secreted protein is not entirely uniform, which results in two or more mature species of the protein. Further, it has long been known that cleavage specificity of a secreted protein is ultimately determined by the primary structure of the complete protein, that is, it is inherent in the amino acid sequence of the polypeptide.

[0382] Methods for predicting whether a protein has a signal sequence, as well as the cleavage point for that sequence, are available. For instance, the method of McGeoch, Virus Res. 3:271-286 (1985), uses the information from a short N-terminal charged region and a subsequent uncharged region of the complete (uncleaved) protein. The method of von Heinje, Nucleic Acids Res. 14:4683-4690 (1986) uses the information from the residues surrounding the cleavage site, typically residues −13 to +2, where +1 indicates the amino terminus of the secreted protein. The accuracy of predicting the cleavage points of known mammalian secretory proteins for each of these methods is in the range of 75-80%. (von Heinje, supra.) However, the two methods do not always produce the same predicted cleavage point(s) for a given protein.

[0383] The established method for identifying the location of signal sequences, in addition, to their cleavage sites has been the SignalP program (v1.1) developed by Henrik Nielsen et al., Protein Engineering 10:1-6 (1997). The program relies upon the algorithm developed by von Heinje, though provides additional parameters to increase the prediction accuracy.

[0384] More recently, a hidden Markov model has been developed (H. Neilson, et al., Ismb 1998;6:122-30), which has been incorporated into the more recent SignalP (v2.0). This new method increases the ability to identify the cleavage site by discriminating between signal peptides and uncleaved signal anchors. The present invention encompasses the application of the method disclosed therein to the prediction of the signal peptide location, including the cleavage site, to any of the polypeptide sequences of the present invention.

[0385] As one of ordinary skill would appreciate, however, cleavage sites sometimes vary from organism to organism and cannot be predicted with absolute certainty. Accordingly, the polypeptide of the present invention may contain a signal sequence. Polypeptides of the invention which comprise a signal sequence have an N-terminus beginning within 5 residues (i.e., + or −5 residues, or preferably at the −5, −4, −3, −2, −1, +1, +2, +3, +4, or +5 residue) of the predicted cleavage point. Similarly, it is also recognized that in some cases, cleavage of the signal sequence from a secreted protein is not entirely uniform, resulting in more than one secreted species. These polypeptides, and the polynucleotides encoding such polypeptides, are contemplated by the present invention.

[0386] Moreover, the signal sequence identified by the above analysis may not necessarily predict the naturally occurring signal sequence. For example, the naturally occurring signal sequence may be further upstream from the predicted signal sequence. However, it is likely that the predicted signal sequence will be capable of directing the secreted protein to the ER. Nonetheless, the present invention provides the mature protein produced by expression of the polynucleotide sequence of SEQ ID NO:X, in a mammalian cell (e.g., COS cells, as described below). These polypeptides, and the polynucleotides encoding such polypeptides, are contemplated by the present invention.

[0387] Polynucleotide and Polypeptide Variants

[0388] The present invention also encompasses variants (e.g., allelic variants, orthologs, etc.) of the polynucleotide sequence disclosed herein in SEQ ID NO:X, the complementary strand thereto.

[0389] The present invention also encompasses variants of the polypeptide sequence, and/or fragments therein, disclosed in SEQ ID NO:Y, a polypeptide encoded by the polynucleotide sequence in SEQ ID NO:X.

[0390] “Variant” refers to a polynucleotide or polypeptide differing from the polynucleotide or polypeptide of the present invention, but retaining essential properties thereof. Generally, variants are overall closely similar, and, in many regions, identical to the polynucleotide or polypeptide of the present invention.

[0391] Thus, one aspect of the invention provides an isolated nucleic acid molecule comprising, or alternatively consisting of, a polynucleotide having a nucleotide sequence selected from the group consisting of: (a) a nucleotide sequence encoding a related polypeptide of the present invention having an amino acid sequence as shown in the sequence listing and described in SEQ ID NO:X; (b) a nucleotide sequence encoding a mature related polypeptide of the present invention having the amino acid sequence as shown in the sequence listing and described in SEQ ID NO:X; (c) a nucleotide sequence encoding a biologically active fragment of a related polypeptide of the present invention having an amino acid sequence shown in the sequence listing and described in SEQ ID NO:X; (d) a nucleotide sequence encoding an antigenic fragment of a related polypeptide of the present invention having an amino acid sequence sown in the sequence listing and described in SEQ ID NO:X; (e) a nucleotide sequence encoding a related polypeptide of the present invention comprising the complete amino acid sequence encoded by a human cDNA plasmid contained in SEQ ID NO:X; (f) a nucleotide sequence encoding a mature related polypeptide of the present invention having an amino acid sequence encoded by a human cDNA plasmid contained in SEQ ID NO:X; (g) a nucleotide sequence encoding a biologically active fragment of a related polypeptide of the present invention having an amino acid sequence encoded by a human cDNA plasmid contained in SEQ ID NO:X; (h) a nucleotide sequence encoding an antigenic fragment of a related polypeptide of the present invention having an amino acid sequence encoded by a human cDNA plasmid contained in SEQ ID NO:X ; (I) a nucleotide sequence complimentary to any of the nucleotide sequences in (a), (b), (c), (d), (e), (f), (g), or (h), above.

[0392] The present invention is also directed to polynucleotide sequences which comprise, or alternatively consist of, a polynucleotide sequence which is at least 80%, 85%, 90%, 91%, 92%, 93%, 94%, 95%, 96%, 97%, 98%, or 99% identical to, for example, any of the nucleotide sequences in (a), (b), (c), (d), (e), (f), (g), or (h), above. Polynucleotides encoded by these nucleic acid molecules are also encompassed by the invention. In another embodiment, the invention encompasses nucleic acid molecules which comprise, or alternatively, consist of a polynucleotide which hybridizes under stringent conditions, or alternatively, under lower stringency conditions, to a polynucleotide in (a), (b), (c), (d), (e), (f), (g), or (h), above. Polynucleotides which hybridize to the complement of these nucleic acid molecules under stringent hybridization conditions or alternatively, under lower stringency conditions, are also encompassed by the invention, as are polypeptides encoded by these polypeptides.

[0393] Another aspect of the invention provides an isolated nucleic acid molecule comprising, or alternatively, consisting of, a polynucleotide having a nucleotide sequence selected from the group consisting of: (a) a nucleotide sequence encoding a related polypeptide of the present invention having an amino acid sequence as shown in the sequence listing and described in Table I, IV, V, or VI; (b) a nucleotide sequence encoding a mature related polypeptide of the present invention having the amino acid sequence as shown in the sequence listing and described in Table I, IV, V, or VI; (c) a nucleotide sequence encoding a biologically active fragment of a related polypeptide of the present invention having an amino acid sequence as shown in the sequence listing and described in Table I, VI, V, or VI; (d) a nucleotide sequence encoding an antigenic fragment of a related polypeptide of the present invention having an amino acid sequence as shown in the sequence listing and descried in Table I, IV, V, or VI; (e) a nucleotide sequence complimentary to any of the nucleotide sequences in (a), (b), (c), (d), or (e) above.

[0394] The present invention is also directed to nucleic acid molecules which comprise, or alternatively, consist of, a nucleotide sequence which is at least 80%, 85%, 90%, 91%, 92%, 93%, 94%, 95%, 96%, 97%, 98%, or 99% identical to, for example, any of the nucleotide sequences in (a), (b), (c), (d), or (e) above.

[0395] The present invention encompasses polypeptide sequences which comprise, or alternatively consist of, an amino acid sequence which is at least 80%, 98%, 90%, 91%, 92%, 93%, 94%, 95%, 96%, 97%, 98%, or 99% identical to, the following non-limited examples, the polypeptide sequence identified as SEQ ID NO:Y, and/or polypeptide fragments of any of the polypeptides provided herein. Polynucleotides encoded by these nucleic acid molecules are also encompassed by the invention. In another embodiment, the invention encompasses nucleic acid molecules which comprise, or alternatively, consist of a polynucleotide which hybridizes under stringent conditions, or alternatively, under lower stringency conditions, to a polynucleotide in (a), (b), (c), (d), or (e) above. Polynucleotides which hybridize to the complement of these nucleic acid molecules under stringent hybridization conditions or alternatively, under lower stringency conditions, are also encompassed by the invention, as are polypeptides encoded by these polypeptides.

[0396] The present invention is also directed to polypeptides which comprise, or alternatively consist of, an amino acid sequence which is at least 80%, 98%, 90%, 91%, 92%, 93%, 94%, 95%, 96%, 97%, 98%, or 99% identical to, for example, the polypeptide sequence shown in SEQ ID NO:Y, a polypeptide sequence encoded by the nucleotide sequence in SEQ ID NO:X, a polypeptide sequence encoded by the cDNA provided in Table I, and/or polypeptide fragments of any of these polypeptides (e.g., those fragments described herein). Polynucleotides which hybridize to the complement of the nucleic acid molecules encoding these polypeptides under stringent hybridization conditions or alternatively, under lower stringency conditions, are also encompasses by the present invention, as are the polypeptides encoded by these polynucleotides.

[0397] By a nucleic acid having a nucleotide sequence at least, for example, 95% “identical” to a reference nucleotide sequence of the present invention, it is intended that the nucleotide sequence of the nucleic acid is identical to the reference sequence except that the nucleotide sequence may include up to five point mutations per each 100 nucleotides of the reference nucleotide sequence encoding the polypeptide. In other words, to obtain a nucleic acid having a nucleotide sequence at least 95% identical to a reference nucleotide sequence, up to 5% of the nucleotides in the reference sequence may be deleted or substituted with another nucleotide, or a number of nucleotides up to 5% of the total nucleotides in the reference sequence may be inserted into the reference sequence. The query sequence may be an entire sequence referenced in Table I, IV, V, or VI, the ORF (open reading frame), or any fragment specified as described herein.

[0398] As a practical matter, whether any particular nucleic acid molecule or polypeptide is at least 80%, 85%, 90%, 91%, 92%, 93%, 94%, 95%, 96%, 97%, 98%, or 99% identical to a nucleotide sequence of the present invention can be determined conventionally using known computer programs. A preferred method for determining the best overall match between a query sequence (a sequence of the present invention) and a subject sequence, also referred to as a global sequence alignment, can be determined using the CLUSTALW computer program (Thompson, J. D., et al., Nucleic Acids Research, 2(22):4673-4680, (1994)), which is based on the algorithm of Higgins, D. G., et al., Computer Applications in the Biosciences (CABIOS), 8(2):189-191, (1992). In a sequence alignment the query and subject sequences are both DNA sequences. An RNA sequence can be compared by converting U's to T's. The result of said global sequence alignment is in percent identity. Preferred parameters used in a CLUSTALW alignment of DNA sequences to calculate percent identify are: Matrix=BLOSUM, k-tuple=1, Number of Top Diagonals=5, Gap Penalty=3, Gap Open Penalty 10, Gap Extension Penalty=0, Scoring Method=Percent, Window Size=5 or the length of the subject nucleotide sequence, whichever is shorter.

[0399] If the subject sequence is shorter than the query sequence because of 5′ or 3′ deletions, not because of internal deletions, a manual correction must be made to the results. This is because the CLUSTALW program does not account for 5′ and 3′ truncations of the subject sequence when calculating percent identity. For subject sequences truncated at the 5′ or 3′ ends, relative to the query sequence, the percent identity is corrected by calculating the number of bases of the query sequence that are 5′ and 3′ of the subject sequence, which are not matched/aligned, as a percent of the total bases of the query sequence. Whether a nucleotide is matched/aligned is determined by results of the CLUSTALW sequence alignment. This percentage is then subtracted from the percent identity, calculated by the above CLUSTALW program using the specified parameters, to arrive at a final percent identity score. This corrected score is what may be used for the purposes of the present invention. Only bases outside the 5′ and 3′ bases of the subject sequence, as displayed by the CLUSTALW alignment, which are not matched/aligned with the query sequence, are calculated for the purposes of manually adjusting the percent identity score.

[0400] For example, a 90 base subject sequence is aligned to a 100 base query sequence to determine percent identity. The deletions occur at the 5′ end of the subject sequence and therefore, the CLUSTALW alignment does not show a matched/alignment of the first 10 bases at 5′ end. The 10 unpaired bases represent 10% of the sequence (number of bases at the 5′ and 3′ ends not matched/total number of bases in the query sequence) so 10% is subtracted from the percent identity score calculated by the CLUSTALW program. If the remaining 90 bases were perfectly matched the final percent identity would be 90%. In another example, a 90 base subject sequence is compared with a 100 base query sequence. This time the deletions are internal deletions so that there are no bases on the 5′ or 3′ of the subject sequence which are not matched/aligned with the query. In this case the percent identity calculated by CLUSTALW is not manually corrected. Once again, only bases 5′ and 3′ of the subject sequence which are not matched/aligned with the query sequence are manually corrected for. No other manual corrections are required for the purposes of the present invention.

[0401] By a polypeptide having an amino acid sequence at least, for example, 95% “identical” to a query amino acid sequence of the present invention, it is intended that the amino acid sequence of the subject polypeptide is identical to the query sequence except that the subject polypeptide sequence may include up to five amino acid alterations per each 100 amino acids of the query amino acid sequence. In other words, to obtain a polypeptide having an amino acid sequence at least 95% identical to a query amino acid sequence, up to 5% of the amino acid residues in the subject sequence may be inserted, deleted, or substituted with another amino acid. These alterations of the reference sequence may occur at the amino- or carboxy-terminal positions of the reference amino acid sequence or anywhere between those terminal positions, interspersed either individually among residues in the reference sequence or in one or more contiguous groups within the reference sequence.

[0402] As a practical matter, whether any particular polypeptide is at least 80%, 85%, 91%, 92%, 93%, 94%, 95%, 96%, 97%, 98%, or 99% identical to, for instance, an amino acid sequence referenced in Table I or Table VI (SEQ ID NO:Y) can be determined conventionally using known computer programs. A preferred method for determining the best overall match between a query sequence (a sequence of the present invention) and a subject sequence, also referred to as a global sequence alignment, can be determined using the CLUSTALW computer program (Thompson, J. D., et al., Nucleic Acids Research, 2(22):4673-4680, (1994)), which is based on the algorithm of Higgins, D. G., et al., Computer Applications in the Biosciences (CABIOS), 8(2):189-191, (1992). In a sequence alignment the query and subject sequences are both DNA sequences. An RNA sequence can be compared by converting U's to T's. The result of said global sequence alignment is in percent identity. Preferred parameters used in a CLUSTALW amino acid alignment are: Matrix=BLOSUM, k-tuple=1, Number of Top Diagonals=5, Gap Penalty=3, Gap Open Penalty 10, Gap Extension Penalty=0, Scoring Method=Percent, Window Size=5 or the length of the subject nucleotide sequence, whichever is shorter.

[0403] If the subject sequence is shorter than the query sequence due to N- or C-terminal deletions, not because of internal deletions, a manual correction must be made to the results. This is because the CLUSTALW program does not account for N- and C-terminal truncations of the subject sequence when calculating global percent identity. For subject sequences truncated at the N- and C-termini, relative to the query sequence, the percent identity is corrected by calculating the number of residues of the query sequence that are N- and C-terminal of the subject sequence, which are not matched/aligned with a corresponding subject residue, as a percent of the total bases of the query sequence. Whether a residue is matched/aligned is determined by results of the CLUSTALW sequence alignment. This percentage is then subtracted from the percent identity, calculated by the above CLUSTALW program using the specified parameters, to arrive at a final percent identity score. This final percent identity score is what may be used for the purposes of the present invention. Only residues to the N-and C-termini of the subject sequence, which are not matched/aligned with the query sequence, are considered for the purposes of manually adjusting the percent identity score. That is, only query residue positions outside the farthest N- and C-terminal residues of the subject sequence.

[0404] For example, a 90 amino acid residue subject sequence is aligned with a 100 residue query sequence to determine percent identity. The deletion occurs at the N-terminus of the subject sequence and therefore, the CLUSTALW alignment does not show a matching/alignment of the first 10 residues at the N-terminus. The 10 unpaired residues represent 10% of the sequence (number of residues at the N- and C- termini not matched/total number of residues in the query sequence) so 10% is subtracted from the percent identity score calculated by the CLUSTALW program. If the remaining 90 residues were perfectly matched the final percent identity would be 90%. In another example, a 90 residue subject sequence is compared with a 100 residue query sequence. This time the deletions are internal deletions so there are no residues at the N- or C-termini of the subject sequence, which are not matched/aligned with the query. In this case the percent identity calculated by CLUSTALW is not manually corrected. Once again, only residue positions outside the N- and C-terminal ends of the subject sequence, as displayed in the CLUSTALW alignment, which are not matched/aligned with the query sequence are manually corrected for. No other manual corrections are required for the purposes of the present invention.

[0405] The variants may contain alterations in the coding regions, non-coding regions, or both. Especially preferred are polynucleotide variants containing alterations which produce silent substitutions, additions, or deletions, but do not alter the properties or activities of the encoded polypeptide. Nucleotide variants produced by silent substitutions due to the degeneracy of the genetic code are preferred. Moreover, variants in which 5-10, 1-5, or 1-2 amino acids are substituted, deleted, or added in any combination are also preferred. Polynucleotide variants can be produced for a variety of reasons, e.g., to optimize codon expression for a particular host (change codons in the mRNA to those preferred by a bacterial host such as E. coli).

[0406] Naturally occurring variants are called “allelic variants,” and refer to one of several alternate forms of a gene occupying a given locus on a chromosome of an organism. (Genes II, Lewin, B., ed., John Wiley & Sons, New York (1985).) These allelic variants can vary at either the polynucleotide and/or polypeptide level and are included in the present invention. Alternatively, non-naturally occurring variants may be produced by mutagenesis techniques or by direct synthesis.

[0407] Using known methods of protein engineering and recombinant DNA technology, variants may be generated to improve or alter the characteristics of the polypeptides of the present invention. For instance, one or more amino acids can be deleted from the N-terminus or C-terminus of the protein without substantial loss of biological function. The authors of Ron et al., J. Biol. Chem.. 268: 2984-2988 (1993), reported variant KGF proteins having heparin binding activity even after deleting 3, 8, or 27 amino-terminal amino acid residues. Similarly, Interferon gamma exhibited up to ten times higher activity after deleting 8-10 amino acid residues from the carboxy terminus of this protein (Dobeli et al., J. Biotechnology 7:199-216 (1988)).

[0408] Moreover, ample evidence demonstrates that variants often retain a biological activity similar to that of the naturally occurring protein. For example, Gayle and coworkers (J. Biol. Chem. 268:22105-22111 (1993)) conducted extensive mutational analysis of human cytokine IL-la. They used random mutagenesis to generate over 3,500 individual IL-la mutants that averaged 2.5 amino acid changes per variant over the entire length of the molecule. Multiple mutations were examined at every possible amino acid position. The investigators found that “[m]ost of the molecule could be altered with little effect on either [binding or biological activity].” In fact, only 23 unique amino acid sequences, out of more than 3,500 nucleotide sequences examined, produced a protein that significantly differed in activity from wild-type.

[0409] Furthermore, even if deleting one or more amino acids from the N-terminus or C-terminus of a polypeptide results in modification or loss of one or more biological functions, other biological activities may still be retained. For example, the ability of a deletion variant to induce and/or to bind antibodies which recognize the protein will likely be retained when less than the majority of the residues of the protein are removed from the N-terminus or C-terminus. Whether a particular polypeptide lacking N- or C-terminal residues of a protein retains such immunogenic activities can readily be determined by routine methods described herein and otherwise known in the art.

[0410] Alternatively, such N-terminus or C-terminus deletions of a polypeptide of the present invention may, in fact, result in a significant increase in one or more of the biological activities of the polypeptide(s). For example, biological activity of many polypeptides are governed by the presence of regulatory domains at either one or both termini. Such regulatory domains effectively inhibit the biological activity of such polypeptides in lieu of an activation event (e.g., binding to a cognate ligand or receptor, phosphorylation, proteolytic processing, etc.). Thus, by eliminating the regulatory domain of a polypeptide, the polypeptide may effectively be rendered biologically active in the absence of an activation event.

[0411] Thus, the invention further includes polypeptide variants that show substantial biological activity. Such variants include deletions, insertions, inversions, repeats, and substitutions selected according to general rules known in the art so as have little effect on activity. For example, guidance concerning how to make phenotypically silent amino acid substitutions is provided in Bowie et al., Science 247:1306-1310 (1990), wherein the authors indicate that there are two main strategies for studying the tolerance of an amino acid sequence to change.

[0412] The first strategy exploits the tolerance of amino acid substitutions by natural selection during the process of evolution. By comparing amino acid sequences in different species, conserved amino acids can be identified. These conserved amino acids are likely important for protein function. In contrast, the amino acid positions where substitutions have been tolerated by natural selection indicates that these positions are not critical for protein function. Thus, positions tolerating amino acid substitution could be modified while still maintaining biological activity of the protein.

[0413] The second strategy uses genetic engineering to introduce amino acid changes at specific positions of a cloned gene to identify regions critical for protein function. For example, site directed mutagenesis or alanine-scanning mutagenesis (introduction of single alanine mutations at every residue in the molecule) can be used. (Cunningham and Wells, Science 244:1081-1085 (1989).) The resulting mutant molecules can then be tested for biological activity.

[0414] As the authors state, these two strategies have revealed that proteins are surprisingly tolerant of amino acid substitutions. The authors further indicate which amino acid changes are likely to be permissive at certain amino acid positions in the protein. For example, most buried (within the tertiary structure of the protein) amino acid residues require nonpolar side chains, whereas few features of surface side chains are generally conserved. Moreover, tolerated conservative amino acid substitutions involve replacement of the aliphatic or hydrophobic amino acids Ala, Val, Leu and Ile; replacement of the hydroxyl residues Ser and Thr; replacement of the acidic residues Asp and Glu; replacement of the amide residues Asn and Gln, replacement of the basic residues Lys, Arg, and His; replacement of the aromatic residues Phe, Tyr, and Trp, and replacement of the small-sized amino acids Ala, Ser, Thr, Met, and Gly.

[0415] Besides conservative amino acid substitution, variants of the present invention include, but are not limited to, the following: (i) substitutions with one or more of the non-conserved amino acid residues, where the substituted amino acid residues may or may not be one encoded by the genetic code, or (ii) substitution with one or more of amino acid residues having a substituent group, or (iii) fusion of the mature polypeptide with another compound, such as a compound to increase the stability and/or solubility of the polypeptide (for example, polyethylene glycol), or (iv) fusion of the polypeptide with additional amino acids, such as, for example, an IgG Fc fusion region peptide, or leader or secretory sequence, or a sequence facilitating purification. Such variant polypeptides are deemed to be within the scope of those skilled in the art from the teachings herein.

[0416] For example, polypeptide variants containing amino acid substitutions of charged amino acids with other charged or neutral amino acids may produce proteins with improved characteristics, such as less aggregation. Aggregation of pharmaceutical formulations both reduces activity and increases clearance due to the aggregate's immunogenic activity. (Pinckard et al., Clin. Exp. Immunol. 2:331-340 (1967); Robbins et al., Diabetes 36: 838-845 (1987); Cleland et al., Crit. Rev. Therapeutic Drug Carrier Systems 10:307-377 (1993).)

[0417] Moreover, the invention further includes polypeptide variants created through the application of molecular evolution (“DNA Shuffling”) methodology to the polynucleotide disclosed as SEQ ID NO:X, and/or the cDNA encoding the polypeptide disclosed as SEQ ID NO:Y. Such DNA Shuffling technology is known in the art and more particularly described elsewhere herein (e.g., WPC, Stemmer, PNAS, 91:10747, (1994)), and in the Examples provided herein).

[0418] A further embodiment of the invention relates to a polypeptide which comprises the amino acid sequence of the present invention having an amino acid sequence which contains at least one amino acid substitution, but not more than 50 amino acid substitutions, even more preferably, not more than 40 amino acid substitutions, still more preferably, not more than 30 amino acid substitutions, and still even more preferably, not more than 20 amino acid substitutions. Of course, in order of ever-increasing preference, it is highly preferable for a peptide or polypeptide to have an amino acid sequence which comprises the amino acid sequence of the present invention, which contains at least one, but not more than 10, 9, 8, 7, 6, 5, 4, 3, 2 or 1 amino acid substitutions. In specific embodiments, the number of additions, substitutions, and/or deletions in the amino acid sequence of the present invention or fragments thereof (e.g., the mature form and/or other fragments described herein), is 1-5, 5-10, 5-25, 5-50, 10-50 or 50-150, conservative amino acid substitutions are preferable.

[0419] Polynucleotide and Polypeptide Fragments

[0420] The present invention is directed to polynucleotide fragments of the polynucleotides of the invention, in addition to polypeptides encoded therein by said polynucleotides and/or fragments.

[0421] In the present invention, a “polynucleotide fragment” refers to a short polynucleotide having a nucleic acid sequence which: is a portion of that shown in SEQ ID NO:X or the complementary strand thereto, or is a portion of a polynucleotide sequence encoding the polypeptide of SEQ ID NO:Y. The nucleotide fragments of the invention are preferably at least about 15 nt, and more preferably at least about 20 nt, still more preferably at least about 30 nt, and even more preferably, at least about 40 nt, at least about 50 nt, at least about 75 nt, or at least about 150 nt in length. A fragment “at least 20 nt in length,” for example, is intended to include 20 or more contiguous bases from the cDNA sequence shown in SEQ ID NO:X. In this context “about” includes the particularly recited value, a value larger or smaller by several (5, 4, 3, 2, or 1) nucleotides, at either terminus, or at both termini. These nucleotide fragments have uses that include, but are not limited to, as diagnostic probes and primers as discussed herein. Of course, larger fragments (e.g., 50, 150, 500, 600, 2000 nucleotides) are preferred.

[0422] Moreover, representative examples of polynucleotide fragments of the invention, include, for example, fragments comprising, or alternatively consisting of, a sequence from about nucleotide number 1-50, 51-100, 101-150, 151-200, 201-250, 251-300, 301-350, 351-400, 401-450, 451-500, 501-550, 551-600, 651-700, 701-750, 751-800, 800-850, 851-900, 901-950, 951-1000, 1001-1050, 1051-1100, 1101-1150, 1151-1200, 1201-1250, 1251-1300, 1301-1350, 1351-1400, 1401-1450, 1451-1500, 1501-1550, 1551-1600, 1601-1650, 1651-1700, 1701-1750, 1751-1800, 1801-1850, 1851-1900, 1901-1950, 1951-2000, or 2001 to the end of SEQ ID NO:X, or the complementary strand thereto. In this context “about” includes the particularly recited ranges, and ranges larger or smaller by several (5, 4, 3, 2, or 1) nucleotides, at either terminus or at both termini. Preferably, these fragments encode a polypeptide which has biological activity. More preferably, these polynucleotides can be used as probes or primers as discussed herein. Also encompassed by the present invention are polynucleotides which hybridize to these nucleic acid molecules under stringent hybridization conditions or lower stringency conditions, as are the polypeptides encoded by these polynucleotides.

[0423] In the present invention, a “polypeptide fragment” refers to an amino acid sequence which is a portion of that contained in SEQ ID NO:Y. Protein (polypeptide) fragments may be “free-standing,” or comprised within a larger polypeptide of which the fragment forms a part or region, most preferably as a single continuous region. Representative examples of polypeptide fragments of the invention, include, for example, fragments comprising, or alternatively consisting of, from about amino acid number 1-20, 21-40, 41-60, 61-80, 81-100, 102-120, 121-140, 141-160, or 161 to the end of the coding region. Moreover, polypeptide fragments can be about 20, 30, 40, 50, 60, 70, 80, 90, 100, 110, 120, 130, 140, or 150 amino acids in length. In this context “about” includes the particularly recited ranges or values, and ranges or values larger or smaller by several (5, 4, 3, 2, or 1) amino acids, at either extreme or at both extremes. Polynucleotides encoding these polypeptides are also encompassed by the invention.

[0424] Preferred polypeptide fragments include the full-length protein. Further preferred polypeptide fragments include the full-length protein having a continuous series of deleted residues from the amino or the carboxy terminus, or both. For example, any number of amino acids, ranging from 1-60, can be deleted from the amino terminus of the full-length polypeptide. Similarly, any number of amino acids, ranging from 1-30, can be deleted from the carboxy terminus of the full-length protein. Furthermore, any combination of the above amino and carboxy terminus deletions are preferred. Similarly, polynucleotides encoding these polypeptide fragments are also preferred.

[0425] Also preferred are polypeptide and polynucleotide fragments characterized by structural or functional domains, such as fragments that comprise alpha-helix and alpha-helix forming regions, beta-sheet and beta-sheet-forming regions, turn and turn-forming regions, coil and coil-forming regions, hydrophilic regions, hydrophobic regions, alpha amphipathic regions, beta amphipathic regions, flexible regions, surface-forming regions, substrate binding region, and high antigenic index regions. Polypeptide fragments of SEQ ID NO:Y falling within conserved domains are specifically contemplated by the present invention. Moreover, polynucleotides encoding these domains are also contemplated.

[0426] Other preferred polypeptide fragments are biologically active fragments. Biologically active fragments are those exhibiting activity similar, but not necessarily identical, to an activity of the polypeptide of the present invention. The biological activity of the fragments may include an improved desired activity, or a decreased undesirable activity. Polynucleotides encoding these polypeptide fragments are also encompassed by the invention.

[0427] In a preferred embodiment, the functional activity displayed by a polypeptide encoded by a polynucleotide fragment of the invention may be one or more biological activities typically associated with the full-length polypeptide of the invention. Illustrative of these biological activities includes the fragments ability to bind to at least one of the same antibodies which bind to the full-length protein, the fragments ability to interact with at lease one of the same proteins which bind to the full-length, the fragments ability to elicit at least one of the same immune responses as the full-length protein (i.e., to cause the immune system to create antibodies specific to the same epitope, etc.), the fragments ability to bind to at least one of the same polynucleotides as the full-length protein, the fragments ability to bind to a receptor of the full-length protein, the fragments ability to bind to a ligand of the full-length protein, and the fragments ability to multimerize with the full-length protein. However, the skilled artisan would appreciate that some fragments may have biological activities which are desirable and directly inapposite to the biological activity of the full-length protein. The functional activity of polypeptides of the invention, including fragments, variants, derivatives, and analogs thereof can be determined by numerous methods available to the skilled artisan, some of which are described elsewhere herein.

[0428] The present invention encompasses polypeptides comprising, or alternatively consisting of, an epitope of the polypeptide having an amino acid sequence of SEQ ID NO:Y, or encoded by a polynucleotide that hybridizes to the complement of the sequence of SEQ ID NO:X under stringent hybridization conditions or lower stringency hybridization conditions as defined supra. The present invention further encompasses polynucleotide sequences encoding an epitope of a polypeptide sequence of the invention (such as, for example, the sequence disclosed in SEQ ID NO:1), polynucleotide sequences of the complementary strand of a polynucleotide sequence encoding an epitope of the invention, and polynucleotide sequences which hybridize to the complementary strand under stringent hybridization conditions or lower stringency hybridization conditions defined supra.

[0429] The term “epitopes,” as used herein, refers to portions of a polypeptide having antigenic or immunogenic activity in an animal, preferably a mammal, and most preferably in a human. In a preferred embodiment, the present invention encompasses a polypeptide comprising an epitope, as well as the polynucleotide encoding this polypeptide. An “immunogenic epitope,” as used herein, is defined as a portion of a protein that elicits an antibody response in an animal, as determined by any method known in the art, for example, by the methods for generating antibodies described infra. (See, for example, Geysen et al., Proc. Natl. Acad. Sci. USA 81:3998- 4002 (1983)). The term “antigenic epitope,” as used herein, is defined as a portion of a protein to which an antibody can immunospecifically bind its antigen as determined by any method well known in the art, for example, by the immunoassays described herein. Immunospecific binding excludes non-specific binding but does not necessarily exclude cross- reactivity with other antigens. Antigenic epitopes need not necessarily be immunogenic.

[0430] Fragments which function as epitopes may be produced by any conventional means. (See, e.g., Houghten, Proc. Natl. Acad. Sci. USA 82:5131-5135 (1985), further described in U.S. Pat. No. 4,631,211).

[0431] In the present invention, antigenic epitopes preferably contain a sequence of at least 4, at least 5, at least 6, at least 7, more preferably at least 8, at least 9, at least 10, at least 11, at least 12, at least 13, at least 14, at least 15, at least 20, at least 25, at least 30, at least 40, at least 50, and, most preferably, between about 15 to about 30 amino acids. Preferred polypeptides comprising immunogenic or antigenic epitopes are at least 10, 15, 20, 25, 30, 35, 40, 45, 50, 55, 60, 65, 70, 75, 80, 85, 90, 95, or 100 amino acid residues in length. Additional non-exclusive preferred antigenic epitopes include the antigenic epitopes disclosed herein, as well as portions thereof. Antigenic epitopes are useful, for example, to raise antibodies, including monoclonal antibodies, that specifically bind the epitope. Preferred antigenic epitopes include the antigenic epitopes disclosed herein, as well as any combination of two, three, four, five or more of these antigenic epitopes. Antigenic epitopes can be used as the target molecules in immunoassays. (See, for instance, Wilson et al., Cell 37:767-778 (1984); Sutcliffe et al., Science 219:660-666 (1983)).

[0432] Similarly, immunogenic epitopes can be used, for example, to induce antibodies according to methods well known in the art. (See, for instance, Sutcliffe et al., supra; Wilson et al., supra; Chow et al., Proc. Natl. Acad. Sci. USA 82:910-914; and Bittle et al., J. Gen. Virol. 66:2347-2354 (1985). Preferred immunogenic epitopes include the immunogenic epitopes disclosed herein, as well as any combination of two, three, four, five or more of these immunogenic epitopes. The polypeptides comprising one or more immunogenic epitopes may be presented for eliciting an antibody response together with a carrier protein, such as an albumin, to an animal system (such as rabbit or mouse), or, if the polypeptide is of sufficient length (at least about 25 amino acids), the polypeptide may be presented without a carrier. However, immunogenic epitopes comprising as few as 8 to 10 amino acids have been shown to be sufficient to raise antibodies capable of binding to, at the very least, linear epitopes in a denatured polypeptide (e.g., in Western blotting).

[0433] Epitope-bearing polypeptides of the present invention may be used to induce antibodies according to methods well known in the art including, but not limited to, in vivo immunization, in vitro immunization, and phage display methods. See, e.g., Sutcliffe et al., supra; Wilson et al., supra, and Bittle et al., J. Gen. Virol., 66:2347-2354 (1985). If in vivo immunization is used, animals may be immunized with free peptide; however, anti-peptide antibody titer may be boosted by coupling the peptide to a macromolecular carrier, such as keyhole limpet hemacyanin (KLH) or tetanus toxoid. For instance, peptides containing cysteine residues may be coupled to a carrier using a linker such as maleimidobenzoyl-N-hydroxysuccinimide ester (MBS), while other peptides may be coupled to carriers using a more general linking agent such as glutaraldehyde. Animals such as rabbits, rats and mice are immunized with either free or carrier- coupled peptides, for instance, by intraperitoneal and/or intradermal injection of emulsions containing about 100 μg of peptide or carrier protein and Freund's adjuvant or any other adjuvant known for stimulating an immune response. Several booster injections may be needed, for instance, at intervals of about two weeks, to provide a useful titer of anti-peptide antibody which can be detected, for example, by ELISA assay using free peptide adsorbed to a solid surface. The titer of anti-peptide antibodies in serum from an immunized animal may be increased by selection of anti-peptide antibodies, for instance, by adsorption to the peptide on a solid support and elution of the selected antibodies according to methods well known in the art.

[0434] As one of skill in the art will appreciate, and as discussed above, the polypeptides of the present invention comprising an immunogenic or antigenic epitope can be fused to other polypeptide sequences. For example, the polypeptides of the present invention may be fused with the constant domain of immunoglobulins (IgA, IgE, IgG, IgM), or portions thereof (CH1, CH2, CH3, or any combination thereof and portions thereof) resulting in chimeric polypeptides. Such fusion proteins may facilitate purification and may increase half-life in vivo. This has been shown for chimeric proteins consisting of the first two domains of the human CD4-polypeptide and various domains of the constant regions of the heavy or light chains of mammalian immunoglobulins. See, e.g., EP 394,827; Traunecker et al., Nature, 331:84-86 (1988). Enhanced delivery of an antigen across the epithelial barrier to the immune system has been demonstrated for antigens (e.g., insulin) conjugated to an FcRn binding partner such as IgG or Fc fragments (see, e.g., PCT Publications WO 96/22024 and WO 99/04813). IgG Fusion proteins that have a disulfide-linked dimeric structure due to the IgG portion disulfide bonds have also been found to be more efficient in binding and neutralizing other molecules than monomeric polypeptides or fragments thereof alone. See, e.g., Fountoulakis et al., J. Biochem., 270:3958-3964 (1995). Nucleic acids encoding the above epitopes can also be recombined with a gene of interest as an epitope tag (e.g., the hemagglutinin (“HA”) tag or flag tag) to aid in detection and purification of the expressed polypeptide. For example, a system described by Janknecht et al. allows for the ready purification of non-denatured fusion proteins expressed in human cell lines (Janknecht et al., 1991, Proc. Natl. Acad. Sci. USA 88:8972-897). In this system, the gene of interest is subcloned into a vaccinia recombination plasmid such that the open reading frame of the gene is translationally fused to an amino-terminal tag consisting of six histidine residues. The tag serves as a matrix binding domain for the fusion protein. Extracts from cells infected with the recombinant vaccinia virus are loaded onto Ni2+ nitriloacetic acid-agarose column and histidine-tagged proteins can be selectively eluted with imidazole-containing buffers.

[0435] Additional fusion proteins of the invention may be generated through the techniques of gene-shuffling, motif-shuffling, exon-shuffling, and/or codon-shuffling (collectively referred to as “DNA shuffling”). DNA shuffling may be employed to modulate the activities of polypeptides of the invention, such methods can be used to generate polypeptides with altered activity, as well as agonists and antagonists of the polypeptides. See, generally, U.S. Pat. Nos. 5,605,793; 5,811,238; 5,830,721; 5,834,252; and 5,837,458, and Patten et al., Curr. Opinion Biotechnol. 8:724-33 (1997); Harayama, Trends Biotechnol. 16(2):76-82 (1998); Hansson, et al., J. Mol. Biol. 287:265-76 (1999); and Lorenzo and Blasco, Biotechniques 24(2):308- 13 (1998) (each of these patents and publications are hereby incorporated by reference in its entirety). In one embodiment, alteration of polynucleotides corresponding to SEQ ID NO:X and the polypeptides encoded by these polynucleotides may be achieved by DNA shuffling. DNA shuffling involves the assembly of two or more DNA segments by homologous or site-specific recombination to generate variation in the polynucleotide sequence. In another embodiment, polynucleotides of the invention, or the encoded polypeptides, may be altered by being subjected to random mutagenesis by error-prone PCR, random nucleotide insertion or other methods prior to recombination. In another embodiment, one or more components, motifs, sections, parts, domains, fragments, etc., of a polynucleotide encoding a polypeptide of the invention may be recombined with one or more components, motifs, sections, parts, domains, fragments, etc. of one or more heterologous molecules.

[0436] Antibodies

[0437] Further polypeptides of the invention relate to antibodies and T-cell antigen receptors (TCR) which immunospecifically bind a polypeptide, polypeptide fragment, or variant of SEQ ID NO:Y, and/or an epitope, of the present invention (as determined by immunoassays well known in the art for assaying specific antibody-antigen binding). Antibodies of the invention include, but are not limited to, polyclonal, monoclonal, monovalent, bispecific, heteroconjugate, multispecific, human, humanized or chimeric antibodies, single chain antibodies, Fab fragments, F(ab′) fragments, fragments produced by a Fab expression library, anti-idiotypic (anti-Id) antibodies (including, e.g., anti-Id antibodies to antibodies of the invention), and epitope-binding fragments of any of the above. The term “antibody,” as used herein, refers to immunoglobulin molecules and immunologically active portions of immunoglobulin molecules, i.e., molecules that contain an antigen binding site that immunospecifically binds an antigen. The immunoglobulin molecules of the invention can be of any type (e.g., IgG, IgE, IgM, IgD, IgA and IgY), class (e.g., IgG1, IgG2, IgG3, IgG4, IgA1 and IgA2) or subclass of immunoglobulin molecule. Moreover, the term “antibody” (Ab) or “monoclonal antibody” (Mab) is meant to include intact molecules, as well as, antibody fragments (such as, for example, Fab and F(ab′)2 fragments) which are capable of specifically binding to protein. Fab and F(ab′)2 fragments lack the Fc fragment of intact antibody, clear more rapidly from the circulation of the animal or plant, and may have less non-specific tissue binding than an intact antibody (Wahl et al., J. Nucl. Med. 24:316-325 (1983)). Thus, these fragments are preferred, as well as the products of a FAB or other immunoglobulin expression library. Moreover, antibodies of the present invention include chimeric, single chain, and humanized antibodies.

[0438] Most preferably the antibodies are human antigen-binding antibody fragments of the present invention and include, but are not limited to, Fab, Fab′ and F(ab′)2, Fd, single-chain Fvs (scFv), single-chain antibodies, disulfide-linked Fvs (sdFv) and fragments comprising either a VL or VH domain. Antigen-binding antibody fragments, including single-chain antibodies, may comprise the variable region(s) alone or in combination with the entirety or a portion of the following: hinge region, CH1, CH2, and CH3 domains. Also included in the invention are antigen-binding fragments also comprising any combination of variable region(s) with a hinge region, CH1, CH2, and CH3 domains. The antibodies of the invention may be from any animal origin including birds and mammals. Preferably, the antibodies are human, murine (e.g., mouse and rat), donkey, ship rabbit, goat, guinea pig, camel, horse, or chicken. As used herein, “human” antibodies include antibodies having the amino acid sequence of a human immunoglobulin and include antibodies isolated from human immunoglobulin libraries or from animals transgenic for one or more human immunoglobulin and that do not express endogenous immunoglobulins, as described infra and, for example in, U.S. Pat. No. 5,939,598 by Kucherlapati et al.

[0439] The antibodies of the present invention may be monospecific, bispecific, trispecific or of greater multispecificity. Multispecific antibodies may be specific for different epitopes of a polypeptide of the present invention or may be specific for both a polypeptide of the present invention as well as for a heterologous epitope, such as a heterologous polypeptide or solid support material. See, e.g., PCT publications WO 93/17715; WO 92/08802; WO 91/00360; WO 92/05793; Tutt, et al., J. Immunol. 147:60-69 (1991); U.S. Pat. Nos. 4,474,893; 4,714,681; 4,925,648; 5,573,920; 5,601,819; Kostelny et al., J. Immunol. 148:1547-1553 (1992).

[0440] Antibodies of the present invention may be described or specified in terms of the epitope(s) or portion(s) of a polypeptide of the present invention which they recognize or specifically bind. The epitope(s) or polypeptide portion(s) may be specified as described herein, e.g., by N-terminal and C-terminal positions, by size in contiguous amino acid residues, or listed in the Tables and Figures. Antibodies which specifically bind any epitope or polypeptide of the present invention may also be excluded. Therefore, the present invention includes antibodies that specifically bind polypeptides of the present invention, and allows for the exclusion of the same.

[0441] Antibodies of the present invention may also be described or specified in terms of their cross-reactivity. Antibodies that do not bind any other analog, ortholog, or homologue of a polypeptide of the present invention are included. Antibodies that bind polypeptides with at least 95%, at least 90%, at least 85%, at least 80%, at least 75%, at least 70%, at least 65%, at least 60%, at least 55%, and at least 50% identity (as calculated using methods known in the art and described herein) to a polypeptide of the present invention are also included in the present invention. In specific embodiments, antibodies of the present invention cross-react with murine, rat and/or rabbit homologues of human proteins and the corresponding epitopes thereof. Antibodies that do not bind polypeptides with less than 95%, less than 90%, less than 85%, less than 80%, less than 75%, less than 70%, less than 65%, less than 60%, less than 55%, and less than 50% identity (as calculated using methods known in the art and described herein) to a polypeptide of the present invention are also included in the present invention. In a specific embodiment, the above-described cross-reactivity is with respect to any single specific antigenic or immunogenic polypeptide, or combination(s) of 2, 3, 4, 5, or more of the specific antigenic and/or immunogenic polypeptides disclosed herein. Further included in the present invention are antibodies which bind polypeptides encoded by polynucleotides which hybridize to a polynucleotide of the present invention under stringent hybridization conditions (as described herein). Antibodies of the present invention may also be described or specified in terms of their binding affinity to a polypeptide of the invention. Preferred binding affinities include those with a dissociation constant or Kd less than 5×10-2 M, 10-2 M, 5×10-3 M, 10-3 M, 5×10-4 M, 10-4 M, 5×10-5 M, 10-5 M, S×10-6 M, 10-6M, 5×10-7 M, 107 M, 5×10-8 M, 10-8 M, 5×10-9 M, 10-9 M, 5×10-10 M, 10-10 M, 5×10-11 M, 10-11 M, 5×10-12 M, 10-12 M, 5×10-13 M, 10-13 M, 5×10-14 M, 10-14 M, 5×10-15 M, or 10-15 M.

[0442] The invention also provides antibodies that competitively inhibit binding of an antibody to an epitope of the invention as determined by any method known in the art for determining competitive binding, for example, the immunoassays described herein. In preferred embodiments, the antibody competitively inhibits binding to the epitope by at least 95%, at least 90%, at least 85 %, at least 80%, at least 75%, at least 70%, at least 60%, or at least 50%.

[0443] Antibodies of the present invention may act as agonists or antagonists of the polypeptides of the present invention. For example, the present invention includes antibodies which disrupt the receptor/ligand interactions with the polypeptides of the invention either partially or fully. Preferably, antibodies of the present invention bind an antigenic epitope disclosed herein, or a portion thereof. The invention features both receptor-specific antibodies and ligand-specific antibodies. The invention also features receptor-specific antibodies which do not prevent ligand binding but prevent receptor activation. Receptor activation (i.e., signaling) may be determined by techniques described herein or otherwise known in the art. For example, receptor activation can be determined by detecting the phosphorylation (e.g., tyrosine or serine/threonine) of the receptor or its substrate by immunoprecipitation followed by western blot analysis (for example, as described supra). In specific embodiments, antibodies are provided that inhibit ligand activity or receptor activity by at least 95%, at least 90%, at least 85%, at least 80%, at least 75%, at least 70%, at least 60%, or at least 50% of the activity in absence of the antibody.

[0444] The invention also features receptor-specific antibodies which both prevent ligand binding and receptor activation as well as antibodies that recognize the receptor-ligand complex, and, preferably, do not specifically recognize the unbound receptor or the unbound ligand. Likewise, included in the invention are neutralizing antibodies which bind the ligand and prevent binding of the ligand to the receptor, as well as antibodies which bind the ligand, thereby preventing receptor activation, but do not prevent the ligand from binding the receptor. Further included in the invention are antibodies which activate the receptor. These antibodies may act as receptor agonists, i.e., potentiate or activate either all or a subset of the biological activities of the ligand-mediated receptor activation, for example, by inducing dimerization of the receptor. The antibodies may be specified as agonists, antagonists or inverse agonists for biological activities comprising the specific biological activities of the peptides of the invention disclosed herein. The above antibody agonists can be made using methods known in the art. See, e.g., PCT publication WO 96/40281; U.S. Pat. No. 5,811,097; Deng et al., Blood 92(6):1981-1988 (1998); Chen et al., Cancer Res. 58(16):3668-3678 (1998); Harrop et al., J. Immunol. 161(4):1786-1794 (1998); Zhu et al., Cancer Res. 58(15):3209-3214 (1998); Yoon et al., J. Immunol. 160(7):3170-3179 (1998); Prat et al., J. Cell. Sci. 1(Pt2):237-247 (1998); Pitard et al., J. Immunol. Methods 205(2):177-190 (1997); Liautard et al., Cytokine 9(4):233-241 (1997); Carlson et al., J. Biol. Chem.. 272(17):11295-11301 (1997); Taryman et al., Neuron 14(4):755-762 (1995); Muller et al., Structure 6(9):1153-1167 (1998); Bartunek et al., Cytokine 8(1):14-20 (1996) (which are all incorporated by reference herein in their entireties).

[0445] Antibodies of the present invention may be used, for example, but not limited to, to purify, detect, and target the polypeptides of the present invention, including both in vitro and in vivo diagnostic and therapeutic methods. For example, the antibodies have use in immunoassays for qualitatively and quantitatively measuring levels of the polypeptides of the present invention in biological samples. See, e.g., Harlow et al., Antibodies: A Laboratory Manual, (Cold Spring Harbor Laboratory Press, 2nd ed. 1988) (incorporated by reference herein in its entirety).

[0446] As discussed in more detail below, the antibodies of the present invention may be used either alone or in combination with other compositions. The antibodies may further be recombinantly fused to a heterologous polypeptide at the N- or C-terminus or chemically conjugated (including covalently and non-covalently conjugations) to polypeptides or other compositions. For example, antibodies of the present invention may be recombinantly fused or conjugated to molecules useful as labels in detection assays and effector molecules such as heterologous polypeptides, drugs, radionucleotides, or toxins. See, e.g., PCT publications WO 92/08495; WO 91/14438; WO89/12624; U.S. Pat. No. 5,314,995; and EP 396,387.

[0447] The antibodies of the invention include derivatives that are modified, i.e., by the covalent attachment of any type of molecule to the antibody such that covalent attachment does not prevent the antibody from generating an anti-idiotypic response. For example, but not by way of limitation, the antibody derivatives include antibodies that have been modified, e.g., by glycosylation, acetylation, pegylation, phosphorylation, amidation, derivatization by known protecting/blocking groups, proteolytic cleavage, linkage to a cellular ligand or other protein, etc. Any of numerous chemical modifications may be carried out by known techniques, including, but not limited to specific chemical cleavage, acetylation, formylation, metabolic synthesis of tunicamycin, etc. Additionally, the derivative may contain one or more non-classical amino acids.

[0448] The antibodies of the present invention may be generated by any suitable method known in the art.

[0449] The antibodies of the present invention may comprise polyclonal antibodies. Methods of preparing polyclonal antibodies are known to the skilled artisan (Harlow, et al., Antibodies: A Laboratory Manual, (Cold spring Harbor Laboratory Press, 2^{nd} ed. (1988), which is hereby incorporated herein by reference in its entirety). For example, a polypeptide of the invention can be administered to various host animals including, but not limited to, rabbits, mice, rats, etc. to induce the production of sera containing polyclonal antibodies specific for the antigen. The administration of the polypeptides of the present invention may entail one or more injections of an immunizing agent and, if desired, an adjuvant. Various adjuvants may be used to increase the immunological response, depending on the host species, and include but are not limited to, Freund's (complete and incomplete), mineral gels such as aluminum hydroxide, surface active substances such as lysolecithin, pluronic polyols, polyanions, peptides, oil emulsions, keyhole limpet hemocyanins, dinitrophenol, and potentially useful human adjuvants such as BCG (bacille Calmette-Guerin) and corynebacterium parvum. Such adjuvants are also well known in the art. For the purposes of the invention, “immunizing agent” may be defined as a polypeptide of the invention, including fragments, variants, and/or derivatives thereof, in addition to fusions with heterologous polypeptides and other forms of the polypeptides described herein.

[0450] Typically, the immunizing agent and/or adjuvant will be injected in the mammal by multiple subcutaneous or intraperitoneal injections, though they may also be given intramuscularly, and/or through IV). The immunizing agent may include polypeptides of the present invention or a fusion protein or variants thereof. Depending upon the nature of the polypeptides (i.e., percent hydrophobicity, percent hydrophilicity, stability, net charge, isoelectric point etc.), it may be useful to conjugate the immunizing agent to a protein known to be immunogenic in the mammal being immunized. Such conjugation includes either chemical conjugation by derivitizing active chemical functional groups to both the polypeptide of the present invention and the immunogenic protein such that a covalent bond is formed, or through fusion-protein based methodology, or other methods known to the skilled artisan. Examples of such immunogenic proteins include, but are not limited to keyhole limpet hemocyanin, serum albumin, bovine thyroglobulin, and soybean trypsin inhibitor. Various adjuvants may be used to increase the immunological response, depending on the host species, including but not limited to Freund's (complete and incomplete), mineral gels such as aluminum hydroxide, surface active substances such as lysolecithin, pluronic polyols, polyanions, peptides, oil emulsions, keyhole limpet hemocyanin, dinitrophenol, and potentially useful human adjuvants such as BCG (bacille Calmette-Guerin) and Corynebacterium parvum. Additional examples of adjuvants which may be employed includes the MPL-TDM adjuvant (monophosphoryl lipid A, synthetic trehalose dicorynomycolate). The immunization protocol may be selected by one skilled in the art without undue experimentation.

[0451] The antibodies of the present invention may comprise monoclonal antibodies. Monoclonal antibodies may be prepared using hybridoma methods, such as those described by Kohler and Milstein, Nature, 256:495 (1975) and U.S. Pat. No. 4,376,110, by Harlow, et al., Antibodies: A Laboratory Manual, (Cold spring Harbor and Laboratory Press, 2 ed. (1988), by Hammerling, et al., Monoclonal Antibodies and T-Cell Hybridomas (Elsevier, N.Y., (1981)), or other methods known to the artisan. Other examples of methods which may be employed for producing monoclonal antibodies includes, but are not limited to, the human B-cell hybridoma technique (Kosbor et al., 1983, Immunology Today 4:72; Cole et al., 1983, Proc. Natl. Acad. Sci. USA 80:2026-2030), and the EBV-hybridoma technique (Cole et al., 1985, Monoclonal Antibodies And Cancer Therapy, Alan R. Liss, Inc., pp. 77-96). Such antibodies may be of any immunoglobulin class including IgG, IgM, IgE, IgA, IgD and any subclass thereof. The hybridoma producing the mAb of this invention may be cultivated in vitro or in vivo. Production of high titers of mAbs in vivo makes this the presently preferred method of production.

[0452] In a hybridoma method, a mouse, a humanized mouse, a mouse with a human immune system, hamster, or other appropriate host animal, is typically immunized with an immunizing agent to elicit lymphocytes that produce or are capable of producing antibodies that will specifically bind to the immunizing agent. Alternatively, the lymphocytes may be immunized in vitro.

[0453] The immunizing agent will typically include polypeptides of the present invention or a fusion protein thereof. Generally, either peripheral blood lymphocytes (“PBLs”) are used if cells of human origin are desired, or spleen cells or lymph node cells are used if non-human mammalian sources are desired. The lymphocytes are then fused with an immortalized cell line using a suitable fusing agent, such as polyethylene glycol, to form a hybridoma cell (Goding, Monoclonal Antibodies: Principles and Practice, Academic Press, (1986), pp. 59-103). Immortalized cell lines are usually transformed mammalian cells, particularly myeloma cells of rodent, bovine and human origin. Usually, rat or mouse myeloma cell lines are employed. The hybridoma cells may be cultured in a suitable culture medium that preferably contains one or more substances that inhibit the growth or survival of the unfused, immortalized cells. For example, if the parental cells lack the enzyme hypoxanthine guanine phosphoribosyl transferase (HGPRT or HPRT), the culture medium for the hybridomas typically will include hypoxanthine, aminopterin, and thymidine (“HAT medium”), which substances prevent the growth of HGPRT-deficient cells.

[0454] Preferred immortalized cell lines are those that fuse efficiently, support stable high level expression of antibody by the selected antibody-producing cells, and are sensitive to a medium such as HAT medium. More preferred immortalized cell lines are murine myeloma lines, which can be obtained, for instance, from the Salk Institute Cell Distribution Center, San Diego, Calif. and the American Type Culture Collection, Manassas, Va. As inferred throughout the specification, human myeloma and mouse-human heteromyeloma cell lines also have been described for the production of human monoclonal antibodies (Kozbor, J. Immunol., 133:3001 (1984); Brodeur et al., Monoclonal Antibody Production Techniques and Applications, Marcel Dekker, Inc., New York, (1987) pp. 51-63).

[0455] The culture medium in which the hybridoma cells are cultured can then be assayed for the presence of monoclonal antibodies directed against the polypeptides of the present invention. Preferably, the binding specificity of monoclonal antibodies produced by the hybridoma cells is determined by immunoprecipitation or by an in vitro binding assay, such as radioimmunoassay (RIA) or enzyme-linked immunoadsorbant assay (ELISA). Such techniques are known in the art and within the skill of the artisan. The binding affinity of the monoclonal antibody can, for example, be determined by the Scatchard analysis of Munson and Pollart, Anal. Biochem., 107:220 (1980).

[0456] After the desired hybridoma cells are identified, the clones may be subcloned by limiting dilution procedures and grown by standard methods (Goding, supra). Suitable culture media for this purpose include, for example, Dulbecco's Modified Eagle's Medium and RPM1-1640. Alternatively, the hybridoma cells may be grown in vivo as ascites in a mammal.

[0457] The monoclonal antibodies secreted by the subclones may be isolated or purified from the culture medium or ascites fluid by conventional immunoglobulin purification procedures such as, for example, protein A-sepharose, hydroxyapatite chromatography, gel exclusion chromatography, gel electrophoresis, dialysis, or affinity chromatography.

[0458] The skilled artisan would acknowledge that a variety of methods exist in the art for the production of monoclonal antibodies and thus, the invention is not limited to their sole production in hydridomas. For example, the monoclonal antibodies may be made by recombinant DNA methods, such as those described in U.S. Pat. No. 4, 816, 567. In this context, the term “monoclonal antibody” refers to an antibody derived from a single eukaryotic, phage, or prokaryotic clone. The DNA encoding the monoclonal antibodies of the invention can be readily isolated and sequenced using conventional procedures (e.g., by using oligonucleotide probes that are capable of binding specifically to genes encoding the heavy and light chains of murine antibodies, or such chains from human, humanized, or other sources). The hydridoma cells of the invention serve as a preferred source of such DNA. Once isolated, the DNA may be placed into expression vectors, which are then transformed into host cells such as Simian COS cells, Chinese hamster ovary (CHO) cells, or myeloma cells that do not otherwise produce immunoglobulin protein, to obtain the synthesis of monoclonal antibodies in the recombinant host cells. The DNA also may be modified, for example, by substituting the coding sequence for human heavy and light chain constant domains in place of the homologous murine sequences (U.S. Pat. No. 4, 816, 567; Morrison et al, supra) or by covalently joining to the immunoglobulin coding sequence all or part of the coding sequence for a non-immunoglobulin polypeptide. Such a non-immunoglobulin polypeptide can be substituted for the constant domains of an antibody of the invention, or can be substituted for the variable domains of one antigen-combining site of an antibody of the invention to create a chimeric bivalent antibody.

[0459] The antibodies may be monovalent antibodies. Methods for preparing monovalent antibodies are well known in the art. For example, one method involves recombinant expression of immunoglobulin light chain and modified heavy chain. The heavy chain is truncated generally at any point in the Fc region so as to prevent heavy chain crosslinking. Alternatively, the relevant cysteine residues are substituted with another amino acid residue or are deleted so as to prevent crosslinking.

[0460] In vitro methods are also suitable for preparing monovalent antibodies. Digestion of antibodies to produce fragments thereof, particularly, Fab fragments, can be accomplished using routine techniques known in the art. Monoclonal antibodies can be prepared using a wide variety of techniques known in the art including the use of hybridoma, recombinant, and phage display technologies, or a combination thereof. For example, monoclonal antibodies can be produced using hybridoma techniques including those known in the art and taught, for example, in Harlow et al., Antibodies: A Laboratory Manual, (Cold Spring Harbor Laboratory Press, 2nd ed. 1988); Hammerling, et al., in: Monoclonal Antibodies and T-Cell Hybridomas 563-681 (Elsevier, N.Y., 1981) (said references incorporated by reference in their entireties). The term “monoclonal antibody” as used herein is not limited to antibodies produced through hybridoma technology. The term “monoclonal antibody” refers to an antibody that is derived from a single clone, including any eukaryotic, prokaryotic, or phage clone, and not the method by which it is produced.

[0461] Methods for producing and screening for specific antibodies using hybridoma technology are routine and well known in the art and are discussed in detail in the Examples herein. In a non-limiting example, mice can be immunized with a polypeptide of the invention or a cell expressing such peptide. Once an immune response is detected, e.g., antibodies specific for the antigen are detected in the mouse serum, the mouse spleen is harvested and splenocytes isolated. The splenocytes are then fused by well-known techniques to any suitable myeloma cells, for example cells from cell line SP20 available from the ATCC. Hybridomas are selected and cloned by limited dilution. The hybridoma clones are then assayed by methods known in the art for cells that secrete antibodies capable of binding a polypeptide of the invention. Ascites fluid, which generally contains high levels of antibodies, can be generated by immunizing mice with positive hybridoma clones.

[0462] Accordingly, the present invention provides methods of generating monoclonal antibodies as well as antibodies produced by the method comprising culturing a hybridoma cell secreting an antibody of the invention wherein, preferably, the hybridoma is generated by fusing splenocytes isolated from a mouse immunized with an antigen of the invention with myeloma cells and then screening the hybridomas resulting from the fusion for hybridoma clones that secrete an antibody able to bind a polypeptide of the invention.

[0463] Antibody fragments which recognize specific epitopes may be generated by known techniques. For example, Fab and F(ab′)2 fragments of the invention may be produced by proteolytic cleavage of immunoglobulin molecules, using enzymes such as papain (to produce Fab fragments) or pepsin (to produce F(ab)2 fragments). F(ab)2 fragments contain the variable region, the light chain constant region and the CH 1 domain of the heavy chain.

[0464] For example, the antibodies of the present invention can also be generated using various phage display methods known in the art. In phage display methods, functional antibody domains are displayed on the surface of phage particles which carry the polynucleotide sequences encoding them. In a particular embodiment, such phage can be utilized to display antigen binding domains expressed from a repertoire or combinatorial antibody library (e.g., human or murine). Phage expressing an antigen binding domain that binds the antigen of interest can be selected or identified with antigen, e.g., using labeled antigen or antigen bound or captured to a solid surface or bead. Phage used in these methods are typically filamentous phage including fd and M13 binding domains expressed from phage with Fab, Fv or disulfide stabilized Fv antibody domains recombinantly fused to either the phage gene III or gene VIII protein. Examples of phage display methods that can be used to make the antibodies of the present invention include those disclosed in Brinkman et al., J. Immunol. Methods 182:41-50 (1995); Ames et al., J. Immunol. Methods 184:177-186 (1995); Kettleborough et al., Eur. J. Immunol. 24:952-958 (1994); Persic et al., Gene 187 9-18 (1997); Burton et al., Advances in Immunology 57:191-280 (1994); PCT application No. PCT/GB91/01134; PCT publications WO 90/02809; WO 91/10737; WO 92/01047; WO 92/18619; WO 93/11236; WO 95/15982; WO 95/20401; and U.S. Pat. Nos. 5,698,426; 5,223,409; 5,403,484; 5,580,717; 5,427,908; 5,750,753; 5,821,047; 5,571,698; 5,427,908; 5,516,637; 5,780,225; 5,658,727; 5,733,743 and 5,969,108; each of which is incorporated herein by reference in its entirety.

[0465] As described in the above references, after phage selection, the antibody coding regions from the phage can be isolated and used to generate whole antibodies, including human antibodies, or any other desired antigen binding fragment, and expressed in any desired host, including mammalian cells, insect cells, plant cells, yeast, and bacteria, e.g., as described in detail below. For example, techniques to recombinantly produce Fab, Fab′ and F(ab′)2 fragments can also be employed using methods known in the art such as those disclosed in PCT publication WO 92/22324; Mullinax et al., BioTechniques 12(6):864-869 (1992); and Sawai et al., AJRI 34:26-34 (1995); and Better et al., Science 240:1041-1043 (1988) (said references incorporated by reference in their entireties). Examples of techniques which can be used to produce single-chain Fvs and antibodies include those described in U.S. Pat. Nos. 4,946,778 and 5,258,498; Huston et al., Methods in Enzymology 203:46-88 (1991); Shu et al., PNAS 90:7995-7999 (1993); and Skerra et al., Science 240:1038-1040 (1988).

[0466] For some uses, including in vivo use of antibodies in humans and in vitro detection assays, it may be preferable to use chimeric, humanized, or human antibodies. A chimeric antibody is a molecule in which different portions of the antibody are derived from different animal species, such as antibodies having a variable region derived from a murine monoclonal antibody and a human immunoglobulin constant region. Methods for producing chimeric antibodies are known in the art. See e.g., Morrison, Science 229:1202 (1985); Oi et al., BioTechniques 4:214 (1986); Gillies et al., (1989) J. Immunol. Methods 125:191-202; U.S. Pat. Nos. 5,807,715; 4,816,567; and 4,816397, which are incorporated herein by reference in their entirety. Humanized antibodies are antibody molecules from non-human species antibody that binds the desired antigen having one or more complementarity determining regions (CDRs) from the non-human species and a framework regions from a human immunoglobulin molecule. Often, framework residues in the human framework regions will be substituted with the corresponding residue from the CDR donor antibody to alter, preferably improve, antigen binding. These framework substitutions are identified by methods well known in the art, e.g., by modeling of the interactions of the CDR and framework residues to identify framework residues important for antigen binding and sequence comparison to identify unusual framework residues at particular positions. (See, e.g., Queen et al., U.S. Pat. No. 5,585,089; Riechmann et al., Nature 332:323 (1988), which are incorporated herein by reference in their entireties.) Antibodies can be humanized using a variety of techniques known in the art including, for example, CDR-grafting (EP 239,400; PCT publication WO 91/09967; U.S. Pat. Nos. 5,225,539; 5,530,101; and 5,585,089), veneering or resurfacing (EP 592,106; EP 519,596; Padlan, Molecular Immunology 28(4/5):489-498 (1991); Studnicka et al., Protein Engineering 7(6):805-814 (1994); Roguska. et al., PNAS 91:969-973 (1994)), and chain shuffling (U.S. Pat. No. 5,565,332). Generally, a humanized antibody has one or more amino acid residues introduced into it from a source that is non-human. These non-human amino acid residues are often referred to as “import” residues, which are typically taken from an “import” variable domain. Humanization can be essentially performed following the methods of Winter and co-workers (Jones et al., Nature, 321:522-525 (1986); Reichmann et al., Nature, 332:323-327 (1988); Verhoeyen et al., Science, 239:1534-1536 (1988), by substituting rodent CDRs or CDR sequences for the corresponding sequences of a human antibody. Accordingly, such “humanized” antibodies are chimeric antibodies (U.S. Pat. No. 4, 816, 567), wherein substantially less than an intact human variable domain has been substituted by the corresponding sequence from a non-human species. In practice, humanized antibodies are typically human antibodies in which some CDR residues and possible some FR residues are substituted from analogous sites in rodent antibodies.

[0467] In general, the humanized antibody will comprise substantially all of at least one, and typically two, variable domains, in which all or substantially all of the CDR regions correspond to those of a non-human immunoglobulin and all or substantially all of the FR regions are those of a human immunoglobulin consensus sequence. The humanized antibody optimally also will comprise at least a portion of an immunoglobulin constant region (Fc), typically that of a human immunoglobulin (Jones et al., Nature, 321:522-525 (1986); Riechmann et al., Nature 332:323-329 (1988)1 and Presta, Curr. Op. Struct. Biol., 2:593-596 (1992).

[0468] Completely human antibodies are particularly desirable for therapeutic treatment of human patients. Human antibodies can be made by a variety of methods known in the art including phage display methods described above using antibody libraries derived from human immunoglobulin sequences. See also, U.S. Pat. Nos. 4,444,887 and 4,716,111; and PCT publications WO 98/46645, WO 98/50433, WO 98/24893, WO 98/16654, WO 96/34096, WO 96/33735, and WO 91/10741; each of which is incorporated herein by reference in its entirety. The techniques of cole et al., and Boerder et al., are also available for the preparation of human monoclonal antibodies (cole et al., Monoclonal Antibodies and Cancer Therapy, Alan R. Riss, (1985); and Boemer et al., J. Immunol., 147(1):86-95, (1991)).

[0469] Human antibodies can also be produced using transgenic mice which are incapable of expressing functional endogenous immunoglobulins, but which can express human immunoglobulin genes. For example, the human heavy and light chain immunoglobulin gene complexes may be introduced randomly or by homologous recombination into mouse embryonic stem cells. Alternatively, the human variable region, constant region, and diversity region may be introduced into mouse embryonic stem cells in addition to the human heavy and light chain genes. The mouse heavy and light chain immunoglobulin genes may be rendered non-functional separately or simultaneously with the introduction of human immunoglobulin loci by homologous recombination. In particular, homozygous deletion of the JH region prevents endogenous antibody production. The modified embryonic stem cells are expanded and microinjected into blastocysts to produce chimeric mice. The chimeric mice are then bred to produce homozygous offspring which express human antibodies. The transgenic mice are immunized in the normal fashion with a selected antigen, e.g., all or a portion of a polypeptide of the invention. Monoclonal antibodies directed against the antigen can be obtained from the immunized, transgenic mice using conventional hybridoma technology. The human immunoglobulin transgenes harbored by the transgenic mice rearrange during B cell differentiation, and subsequently undergo class switching and somatic mutation. Thus, using such a technique, it is possible to produce therapeutically useful IgG, IgA, IgM and IgE antibodies. For an overview of this technology for producing human antibodies, see Lonberg and Huszar, Int. Rev. Immunol. 13:65-93 (1995). For a detailed discussion of this technology for producing human antibodies and human monoclonal antibodies and protocols for producing such antibodies, see, e.g., PCT publications WO 98/24893; WO 92/01047; WO 96/34096; WO 96/33735; European Patent No. 0 598 877; U.S. Pat. Nos. 5,413,923;. 5,625,126; 5,633,425; 5,569,825; 5,661,016; 5,545,806; 5,814,318; 5,885,793; 5,916,771; and 5,939,598, which are incorporated by reference herein in their entirety. In addition, companies such as Abgenix, Inc. (Freemont, Calif.), Genpharm (San Jose, Calif.), and Medarex, Inc. (Princeton, N.J.) can be engaged to provide human antibodies directed against a selected antigen using technology similar to that described above.

[0470] Similarly, human antibodies can be made by introducing human immunoglobulin loci into transgenic animals, e.g., mice in which the endogenous immunoglobulin genes have been partially or completely inactivated. Upon challenge, human antibody production is observed, which closely resembles that seen in humans in all respects, including gene rearrangement, assembly, and creation of an antibody repertoire. This approach is described, for example, in U.S. Pat. Nos. 5,545,807; 5,545,806; 5,569,825; 5,625,126; 5,633,425; 5,661,106, and in the following scientific publications: Marks et al., Biotechnol., 10:779-783 (1992); Lonberg et al., Nature 368:856-859 (1994); Fishwild et al., Nature Biotechnol., 14:845-51 (1996); Neuberger, Nature Biotechnol., 14:826 (1996); Lonberg and Huszer, Intern. Rev. Immunol., 13:65-93 (1995).

[0471] Completely human antibodies which recognize a selected epitope can be generated using a technique referred to as “guided selection.” In this approach a selected non-human monoclonal antibody, e.g., a mouse antibody, is used to guide the selection of a completely human antibody recognizing the same epitope. (Jespers et al., Bio/technology 12:899-903 (1988)).

[0472] Further, antibodies to the polypeptides of the invention can, in turn, be utilized to generate anti-idiotype antibodies that “mimic” polypeptides of the invention using techniques well known to those skilled in the art. (See, e.g., Greenspan & Bona, FASEB J. 7(5):437-444; (1989) and Nissinoff, J. Immunol. 147(8):2429-2438 (1991)). For example, antibodies which bind to and competitively inhibit polypeptide multimerization and/or binding of a polypeptide of the invention to a ligand can be used to generate anti-idiotypes that “mimic” the polypeptide multimerization and/or binding domain and, as a consequence, bind to and neutralize polypeptide and/or its ligand. Such neutralizing anti-idiotypes or Fab fragments of such anti-idiotypes can be used in therapeutic regimens to neutralize polypeptide ligand. For example, such anti-idiotypic antibodies can be used to bind a polypeptide of the invention and/or to bind its ligands/receptors, and thereby block its biological activity.

[0473] The antibodies of the present invention may be bispecific antibodies. Bispecific antibodies are monoclonal, preferably human or humanized, antibodies that have binding specificities for at least two different antigens. In the present invention, one of the binding specificities may be directed towards a polypeptide of the present invention, the other may be for any other antigen, and preferably for a cell-surface protein, receptor, receptor subunit, tissue-specific antigen, virally derived protein, virally encoded envelope protein, bacterially derived protein, or bacterial surface protein, etc.

[0474] Methods for making bispecific antibodies are known in the art. Traditionally, the recombinant production of bispecific antibodies is based on the co-expression of two immunoglobulin heavy-chain/light-chain pairs, where the two heavy chains have different specificities (Milstein and Cuello, Nature, 305:537-539 (1983). Because of the random assortment of immunoglobulin heavy and light chains, these hybridomas (quadromas) produce a potential mixture of ten different antibody molecules, of which only one has the correct bispecific structure. The purification of the correct molecule is usually accomplished by affinity chromatography steps. Similar procedures are disclosed in WO 93/08829, published 13 May 1993, and in Traunecker et al., EMBO J., 10:3655-3659 (1991).

[0475] Antibody variable domains with the desired binding specificities (antibody-antigen combining sites) can be fused to immunoglobulin constant domain sequences. The fusion preferably is with an immunoglobulin heavy-chain constant domain, comprising at least part of the hinge, CH2, and CH3 regions. It is preferred to have the first heavy-chain constant region (CH1) containing the site necessary for light-chain binding present in at least one of the fusions. DNAs encoding the immunoglobulin heavy-chain fusions and, if desired, the immunoglobulin light chain, are inserted into separate expression vectors, and are co-transformed into a suitable host organism. For further details of generating bispecific antibodies see, for example Suresh et al., Meth. In Enzym., 121:210 (1986).

[0476] Heteroconjugate antibodies are also contemplated by the present invention. Heteroconjugate antibodies are composed of two covalently joined antibodies. Such antibodies have, for example, been proposed to target immune system cells to unwanted cells (U.S. Pat. No. 4,676,980), and for the treatment of HIV infection (WO 91/00360; WO 92/20373; and EP03089). It is contemplated that the antibodies may be prepared in vitro using known methods in synthetic protein chemistry, including those involving crosslinking agents. For example, immunotoxins may be constructed using a disulfide exchange reaction or by forming a thioester bond. Examples of suitable reagents for this purpose include iminothiolate and methyl-4-mercaptobutyrimidate and those disclosed, for example, in U.S. Pat. No. 4,676,980.

[0477] Polynucleotides Encoding Antibodies

[0478] The invention further provides polynucleotides comprising a nucleotide sequence encoding an antibody of the invention and fragments thereof. The invention also encompasses polynucleotides that hybridize under stringent or lower stringency hybridization conditions, e.g., as defined supra, to polynucleotides that encode an antibody, preferably, that specifically binds to a polypeptide of the invention, preferably, an antibody that binds to a polypeptide having the amino acid sequence of SEQ ID NO:Y.

[0479] The polynucleotides may be obtained, and the nucleotide sequence of the polynucleotides determined, by any method known in the art. For example, if the nucleotide sequence of the antibody is known, a polynucleotide encoding the antibody may be assembled from chemically synthesized oligonucleotides (e.g., as described in Kutmeier et al., BioTechniques 17:242 (1994)), which, briefly, involves the synthesis of overlapping oligonucleotides containing portions of the sequence encoding the antibody, annealing and ligating of those oligonucleotides, and then amplification of the ligated oligonucleotides by PCR.

[0480] Alternatively, a polynucleotide encoding an antibody may be generated from nucleic acid from a suitable source. If a clone containing a nucleic acid encoding a particular antibody is not available, but the sequence of the antibody molecule is known, a nucleic acid encoding the immunoglobulin may be chemically synthesized or obtained from a suitable source (e.g., an antibody cDNA library, or a cDNA library generated from, or nucleic acid, preferably poly A+ RNA, isolated from, any tissue or cells expressing the antibody, such as hybridoma cells selected to express an antibody of the invention) by PCR amplification using synthetic primers hybridizable to the 3′ and 5′ ends of the sequence or by cloning using an oligonucleotide probe specific for the particular gene sequence to identify, e.g., a cDNA clone from a cDNA library that encodes the antibody. Amplified nucleic acids generated by PCR may then be cloned into replicable cloning vectors using any method well known in the art.

[0481] Once the nucleotide sequence and corresponding amino acid sequence of the antibody is determined, the nucleotide sequence of the antibody may be manipulated using methods well known in the art for the manipulation of nucleotide sequences, e.g., recombinant DNA techniques, site directed mutagenesis, PCR, etc. (see, for example, the techniques described in Sambrook et al., 1990, Molecular Cloning, A Laboratory Manual, 2d Ed., Cold Spring Harbor Laboratory, Cold Spring Harbor, N.Y. and Ausubel et al., eds., 1998, Current Protocols in Molecular Biology, John Wiley & Sons, N.Y., which are both incorporated by reference herein in their entireties ), to generate antibodies having a different amino acid sequence, for example to create amino acid substitutions, deletions, and/or insertions.

[0482] In a specific embodiment, the amino acid sequence of the heavy and/or light chain variable domains may be inspected to identify the sequences of the complementarity determining regions (CDRs) by methods that are well know in the art, e.g., by comparison to known amino acid sequences of other heavy and light chain variable regions to determine the regions of sequence hypervariability. Using routine recombinant DNA techniques, one or more of the CDRs may be inserted within framework regions, e.g., into human framework regions to humanize a non-human antibody, as described supra. The framework regions may be naturally occurring or consensus framework regions, and preferably human framework regions (see, e.g., Chothia et al., J. Mol. Biol. 278: 457-479 (1998) for a listing of human framework regions). Preferably, the polynucleotide generated by the combination of the framework regions and CDRs encodes an antibody that specifically binds a polypeptide of the invention. Preferably, as discussed supra, one or more amino acid substitutions may be made within the framework regions, and, preferably, the amino acid substitutions improve binding of the antibody to its antigen. Additionally, such methods may be used to make amino acid substitutions or deletions of one or more variable region cysteine residues participating in an intrachain disulfide bond to generate antibody molecules lacking one or more intrachain disulfide bonds. Other alterations to the polynucleotide are encompassed by the present invention and within the skill of the art.

[0483] In addition, techniques developed for the production of “chimeric antibodies” (Morrison et al., Proc. Natl. Acad. Sci. 81:851-855 (1984); Neuberger et al., Nature 312:604-608 (1984); Takeda et al., Nature 314:452-454 (1985)) by splicing genes from a mouse antibody molecule of appropriate antigen specificity together with genes from a human antibody molecule of appropriate biological activity can be used. As described supra, a chimeric antibody is a molecule in which different portions are derived from different animal species, such as those having a variable region derived from a murine mAb and a human immunoglobulin constant region, e.g., humanized antibodies.

[0484] Alternatively, techniques described for the production of single chain antibodies (U.S. Pat. No. 4,946,778; Bird, Science 242:423- 42 (1988); Huston et al., Proc. Natl. Acad. Sci. USA 85:5879-5883 (1988); and Ward et al., Nature 334:544-54 (1989)) can be adapted to produce single chain antibodies. Single chain antibodies are formed by linking the heavy and light chain fragments of the Fv region via an amino acid bridge, resulting in a single chain polypeptide. Techniques for the assembly of functional Fv fragments in E. coli may also be used (Skerra et al., Science242:1038- 1041 (1988)).

[0485] Methods of Producing Antibodies

[0486] The antibodies of the invention can be produced by any method known in the art for the synthesis of antibodies, in particular, by chemical synthesis or preferably, by recombinant expression techniques.

[0487] Recombinant expression of an antibody of the invention, or fragment, derivative or analog thereof, (e.g., a heavy or light chain of an antibody of the invention or a single chain antibody of the invention), requires construction of an expression vector containing a polynucleotide that encodes the antibody. Once a polynucleotide encoding an antibody molecule or a heavy or light chain of an antibody, or portion thereof (preferably containing the heavy or light chain variable domain), of the invention has been obtained, the vector for the production of the antibody molecule may be produced by recombinant DNA technology using techniques well known in the art. Thus, methods for preparing a protein by expressing a polynucleotide containing an antibody encoding nucleotide sequence are described herein. Methods which are well known to those skilled in the art can be used to construct expression vectors containing antibody coding sequences and appropriate transcriptional and translational control signals. These methods include, for example, in vitro recombinant DNA techniques, synthetic techniques, and in vivo genetic recombination. The invention, thus, provides replicable vectors comprising a nucleotide sequence encoding an antibody molecule of the invention, or a heavy or light chain thereof, or a heavy or light chain variable domain, operably linked to a promoter. Such vectors may include the nucleotide sequence encoding the constant region of the antibody molecule (see, e.g., PCT Publication WO 86/05807; PCT Publication WO 89/01036; and U.S. Pat. No. 5,122,464) and the variable domain of the antibody may be cloned into such a vector for expression of the entire heavy or light chain.

[0488] The expression vector is transferred to a host cell by conventional techniques and the transfected cells are then cultured by conventional techniques to produce an antibody of the invention. Thus, the invention includes host cells containing a polynucleotide encoding an antibody of the invention, or a heavy or light chain thereof, or a single chain antibody of the invention, operably linked to a heterologous promoter. In preferred embodiments for the expression of double-chained antibodies, vectors encoding both the heavy and light chains may be co-expressed in the host cell for expression of the entire immunoglobulin molecule, as detailed below.

[0489] A variety of host-expression vector systems may be utilized to express the antibody molecules of the invention. Such host-expression systems represent vehicles by which the coding sequences of interest may be produced and subsequently purified, but also represent cells which may, when transformed or transfected with the appropriate nucleotide coding sequences, express an antibody molecule of the invention in situ. These include but are not limited to microorganisms such as bacteria (e.g., E. coli, B. subtilis) transformed with recombinant bacteriophage DNA, plasmid DNA or cosmid DNA expression vectors containing antibody coding sequences; yeast (e.g., Saccharomyces, Pichia) transformed with recombinant yeast expression vectors containing antibody coding sequences; insect cell systems infected with recombinant virus expression vectors (e.g., baculovirus) containing antibody coding sequences; plant cell systems infected with recombinant virus expression vectors (e.g., cauliflower mosaic virus, CaMV; tobacco mosaic virus, TMV) or transformed with recombinant plasmid expression vectors (e.g., Ti plasmid) containing antibody coding sequences; or mammalian cell systems (e.g., COS, CHO, BHK, 293, 3T3 cells) harboring recombinant expression constructs containing promoters derived from the genome of mammalian cells (e.g., metallothionein promoter) or from mammalian viruses (e.g., the adenovirus late promoter; the vaccinia virus 7.5K promoter). Preferably, bacterial cells such as Escherichia coli, and more preferably, eukaryotic cells, especially for the expression of whole recombinant antibody molecule, are used for the expression of a recombinant antibody molecule. For example, mammalian cells such as Chinese hamster ovary cells (CHO), in conjunction with a vector such as the major intermediate early gene promoter element from human cytomegalovirus is an effective expression system for antibodies (Foecking et al., Gene 45:101 (1986); Cockett et al., Bio/Technology 8:2 (1990)).

[0490] In bacterial systems, a number of expression vectors may be advantageously selected depending upon the use intended for the antibody molecule being expressed. For example, when a large quantity of such a protein is to be produced, for the generation of pharmaceutical compositions of an antibody molecule, vectors which direct the expression of high levels of fusion protein products that are readily purified may be desirable. Such vectors include, but are not limited, to the E. coli expression vector pUR278 (Ruther et al., EMBO J. 2:1791 (1983)), in which the antibody coding sequence may be ligated individually into the vector in frame with the lac Z coding region so that a fusion protein is produced; pIN vectors (Inouye & Inouye, Nucleic Acids Res. 13:3101-3109 (1985); Van Heeke & Schuster, J. Biol. Chem.. 24:5503-5509 (1989)); and the like. pGEX vectors may also be used to express foreign polypeptides as fusion proteins with glutathione S-transferase (GST). In general, such fusion proteins are soluble and can easily be purified from lysed cells by adsorption and binding to matrix glutathione-agarose beads followed by elution in the presence of free glutathione. The pGEX vectors are designed to include thrombin or factor Xa protease cleavage sites so that the cloned target gene product can be released from the GST moiety.

[0491] In an insect system, Autographa califomica nuclear polyhedrosis virus (AcNPV) is used as a vector to express foreign genes. The virus grows in Spodoptera frugiperda cells. The antibody coding sequence may be cloned individually into non-essential regions (for example the polyhedrin gene) of the virus and placed under control of an AcNPV promoter (for example the polyhedrin promoter).

[0492] In mammalian host cells, a number of viral-based expression systems may be utilized. In cases where an adenovirus is used as an expression vector, the antibody coding sequence of interest may be ligated to an adenovirus transcription/translation control complex, e.g., the late promoter and tripartite leader sequence. This chimeric gene may then be inserted in the adenovirus genome by in vitro or in vivo recombination. Insertion in a non- essential region of the viral genome (e.g., region E1 or E3) will result in a recombinant virus that is viable and capable of expressing the antibody molecule in infected hosts. (e.g., see Logan & Shenk, Proc. Natl. Acad. Sci. USA 81:355-359 (1984)). Specific initiation signals may also be required for efficient translation of inserted antibody coding sequences. These signals include the ATG initiation codon and adjacent sequences. Furthermore, the initiation codon must be in phase with the reading frame of the desired coding sequence to ensure translation of the entire insert. These exogenous translational control signals and initiation codons can be of a variety of origins, both natural and synthetic. The efficiency of expression may be enhanced by the inclusion of appropriate transcription enhancer elements, transcription terminators, etc. (see Bittner et al., Methods in Enzymol. 153:51-544 (1987)).

[0493] In addition, a host cell strain may be chosen which modulates the expression of the inserted sequences, or modifies and processes the gene product in the specific fashion desired. Such modifications (e.g., glycosylation) and processing (e.g., cleavage) of protein products may be important for the function of the protein. Different host cells have characteristic and specific mechanisms for the post-translational processing and modification of proteins and gene products. Appropriate cell lines or host systems can be chosen to ensure the correct modification and processing of the foreign protein expressed. To this end, eukaryotic host cells which possess the cellular machinery for proper processing of the primary transcript, glycosylation, and phosphorylation of the gene product may be used. Such mammalian host cells include but are not limited to CHO, VERY, BHK, Hela, COS, MDCK, 293, 3T3, WI38, and in particular, breast cancer cell lines such as, for example, BT483, Hs578T, HTB2, BT20 and T47D, and normal mammary gland cell line such as, for example, CRL7030 and Hs578Bst.

[0494] For long-term, high-yield production of recombinant proteins, stable expression is preferred. For example, cell lines which stably express the antibody molecule may be engineered. Rather than using expression vectors which contain viral origins of replication, host cells can be transformed with DNA controlled by appropriate expression control elements (e.g., promoter, enhancer, sequences, transcription terminators, polyadenylation sites, etc.), and a selectable marker. Following the introduction of the foreign DNA, engineered cells may be allowed to grow for 1-2 days in an enriched media, and then are switched to a selective media. The selectable marker in the recombinant plasmid confers resistance to the selection and allows cells to stably integrate the plasmid into their chromosomes and grow to form foci which in turn can be cloned and expanded into cell lines. This method may advantageously be used to engineer cell lines which express the antibody molecule. Such engineered cell lines may be particularly useful in screening and evaluation of compounds that interact directly or indirectly with the antibody molecule.

[0495] A number of selection systems may be used, including but not limited to the herpes simplex virus thymidine kinase (Wigler et al., Cell 11:223 (1977)), hypoxanthine-guanine phosphoribosyltransferase (Szybalska & Szybalski, Proc. Natl. Acad. Sci. USA 48:202 (1992)), and adenine phosphoribosyltransferase (Lowy et al., Cell 22:817 (1980)) genes can be employed in tk-, hgprt- or aprt- cells, respectively. Also, antimetabolite resistance can be used as the basis of selection for the following genes: dhfr, which confers resistance to methotrexate (Wigler et al., Natl. Acad. Sci. USA 77:357 (1980); OHare et al., Proc. Natl. Acad. Sci. USA 78:1527 (1981)); gpt, which confers resistance to mycophenolic acid (Mulligan & Berg, Proc. Natl. Acad. Sci. USA 78:2072 (1981)); neo, which confers resistance to the arninoglycoside G-418 Clinical Pharmacy 12:488-505; Wu and Wu, Biotherapy 3:87-95 (1991); Tolstoshev, Ann. Rev. Pharmacol. Toxicol. 32:573-596 (1993); Mulligan, Science 260:926-932 (1993); and Morgan and Anderson, Ann. Rev. Biochem. 62:191-217 (1993); May, 1993, TIB TECH 11(5):155-215); and hygro, which confers resistance to hygromycin (Santerre et al., Gene 30:147 (1984)). Methods commonly known in the art of recombinant DNA technology may be routinely applied to select the desired recombinant clone, and such methods are described, for example, in Ausubel et al. (eds.), Current Protocols in Molecular Biology, John Wiley & Sons, N.Y. (1993); Kriegler, Gene Transfer and Expression, A Laboratory Manual, Stockton Press, N.Y. (1990); and in Chapters 12 and 13, Dracopoli et al. (eds), Current Protocols in Human Genetics, John Wiley & Sons, N.Y. (1994); Colberre-Garapin et al., J. Mol. Biol. 150:1 (1981), which are incorporated by reference herein in their entireties.

[0496] The expression levels of an antibody molecule can be increased by vector amplification (for a review, see Bebbington and Hentschel, The use of vectors based on gene amplification for the expression of cloned genes in mammalian cells in DNA cloning, Vol.3. (Academic Press, New York, 1987)). When a marker in the vector system expressing antibody is amplifiable, increase in the level of inhibitor present in culture of host cell will increase the number of copies of the marker gene. Since the amplified region is associated with the antibody gene, production of the antibody will also increase (Crouse et al., Mol. Cell. Biol. 3:257 (1983)).

[0497] The host cell may be co-transfected with two expression vectors of the invention, the first vector encoding a heavy chain derived polypeptide and the second vector encoding a light chain derived polypeptide. The two vectors may contain identical selectable markers which enable equal expression of heavy and light chain polypeptides. Alternatively, a single vector may be used which encodes, and is capable of expressing, both heavy and light chain polypeptides. In such situations, the light chain should be placed before the heavy chain to avoid an excess of toxic free heavy chain (Proudfoot, Nature 322:52 (1986); Kohler, Proc. Natl. Acad. Sci. USA 77:2197 (1980)). The coding sequences for the heavy and light chains may comprise cDNA or genomic DNA.

[0498] Once an antibody molecule of the invention has been produced by an animal, chemically synthesized, or recombinantly expressed, it may be purified by any method known in the art for purification of an immunoglobulin molecule, for example, by chromatography (e.g., ion exchange, affinity, particularly by affinity for the specific antigen after Protein A, and sizing column chromatography), centrifugation, differential solubility, or by any other standard technique for the purification of proteins. In addition, the antibodies of the present invention or fragments thereof can be fused to heterologous polypeptide sequences described herein or otherwise known in the art, to facilitate purification.

[0499] The present invention encompasses antibodies recombinantly fused or chemically conjugated (including both covalently and non-covalently conjugations) to a polypeptide (or portion thereof, preferably at least 10, 20, 30, 40, 50, 60, 70, 80, 90 or 100 amino acids of the polypeptide) of the present invention to generate fusion proteins. The fusion does not necessarily need to be direct, but may occur through linker sequences. The antibodies may be specific for antigens other than polypeptides (or portion thereof, preferably at least 10, 20, 30, 40, 50, 60, 70, 80, 90 or 100 amino acids of the polypeptide) of the present invention. For example, antibodies may be used to target the polypeptides of the present invention to particular cell types, either in vitro or in vivo, by fusing or conjugating the polypeptides of the present invention to antibodies specific for particular cell surface receptors. Antibodies fused or conjugated to the polypeptides of the present invention may also be used in vitro immunoassays and purification methods using methods known in the art. See e.g., Harbor et al., supra, and PCT publication WO 93/21232; EP 439,095; Naramura et al., Immunol. Lett. 39:91-99 (1994); U.S. Pat. No. 5,474,981; Gillies et al., PNAS 89:1428-1432 (1992); Fell et al., J. Immunol. 146:2446-2452(1991), which are incorporated by reference in their entireties.

[0500] The present invention further includes compositions comprising the polypeptides of the present invention fused or conjugated to antibody domains other than the variable regions. For example, the polypeptides of the present invention may be fused or conjugated to an antibody Fc region, or portion thereof. The antibody portion fused to a polypeptide of the present invention may comprise the constant region, hinge region, CH1 domain, CH2 domain, and CH3 domain or any combination of whole domains or portions thereof. The polypeptides may also be fused or conjugated to the above antibody portions to form multimers. For example, Fc portions fused to the polypeptides of the present invention can form dimers through disulfide bonding between the Fc portions. Higher multimeric forms can be made by fusing the polypeptides to portions of IgA and IgM. Methods for fusing or conjugating the polypeptides of the present invention to antibody portions are known in the art. See, e.g., U.S. Pat. Nos. 5,336,603; 5,622,929; 5,359,046; 5,349,053; 5,447,851; 5,112,946; EP 307,434; EP 367,166; PCT publications WO 96/04388; WO 91/06570; Ashkenazi et al., Proc. Natl. Acad. Sci. USA 88:10535-10539 (1991); Zheng et al., J. Immunol. 154:5590-5600 (1995); and Vil et al., Proc. Natl. Acad. Sci. USA 89:11337- 11341(1992) (said references incorporated by reference in their entireties).

[0501] As discussed, supra, the polypeptides corresponding to a polypeptide, polypeptide fragment, or a variant of SEQ ID NO:Y may be fused or conjugated to the above antibody portions to increase the in vivo half life of the polypeptides or for use in immunoassays using methods known in the art. Further, the polypeptides corresponding to SEQ ID NO:Y may be fused or conjugated to the above antibody portions to facilitate purification. One reported example describes chimeric proteins consisting of the first two domains of the human CD4-polypeptide and various domains of the constant regions of the heavy or light chains of mammalian immunoglobulins. (EP 394,827; Traunecker et al., Nature 331:84-86 (1988). The polypeptides of the present invention fused or conjugated to an antibody having disulfide- linked dimeric structures (due to the IgG) may also be more efficient in binding and neutralizing other molecules, than the monomeric secreted protein or protein fragment alone. (Fountoulakis et al., J. Biochem. 270:3958-3964 (1995)). In many cases, the Fc part in a fusion protein is beneficial in therapy and diagnosis, and thus can result in, for example, improved pharmacokinetic properties. (EP A 232,262). Alternatively, deleting the Fc part after the fusion protein has been expressed, detected, and purified, would be desired. For example, the Fc portion may hinder therapy and diagnosis if the fusion protein is used as an antigen for immunizations. In drug discovery, for example, human proteins, such as hIL-5, have been fused with Fc portions for the purpose of high-throughput screening assays to identify antagonists of hIL-5. (See, Bennett et al., J. Molecular Recognition 8:52-58 (1995); Johanson et al., J. Biol. Chem.. 270:9459-9471 (1995).

[0502] Moreover, the antibodies or fragments thereof of the present invention can be fused to marker sequences, such as a peptide to facilitate purification. In preferred embodiments, the marker amino acid sequence is a hexa-histidine peptide, such as the tag provided in a pQE vector (QIAGEN, Inc., 9259 Eton Avenue, Chatsworth, Calif., 91311), among others, many of which are commercially available. As described in Gentz et al., Proc. Natl. Acad. Sci. USA 86:821-824 (1989), for instance, hexa-histidine provides for convenient purification of the fusion protein. Other peptide tags useful for purification include, but are not limited to, the “HA” tag, which corresponds to an epitope derived from the influenza hemagglutinin protein (Wilson et al., Cell 37:767 (1984)) and the “flag” tag.

[0503] The present invention further encompasses antibodies or fragments thereof conjugated to a diagnostic or therapeutic agent. The antibodies can be used diagnostically to, for example, monitor the development or progression of a tumor as part of a clinical testing procedure to, e.g., determine the efficacy of a given treatment regimen. Detection can be facilitated by coupling the antibody to a detectable substance. Examples of detectable substances include various enzymes, prosthetic groups, fluorescent materials, luminescent materials, bioluminescent materials, radioactive materials, positron emitting metals using various positron emission tomographies, and nonradioactive paramagnetic metal ions. The detectable substance may be coupled or conjugated either directly to the antibody (or fragment thereof) or indirectly, through an intermediate (such as, for example, a linker known in the art) using techniques known in the art. See, for example, U.S. Pat. No. 4,741,900 for metal ions which can be conjugated to antibodies for use as diagnostics according to the present invention. Examples of suitable enzymes include horseradish peroxidase, alkaline phosphatase, beta-galactosidase, or acetylcholinesterase; examples of suitable prosthetic group complexes include streptavidin/biotin and avidin/biotin; examples of suitable fluorescent materials include umbelliferone, fluorescein, fluorescein isothiocyanate, rhodamine, dichlorotriazinylamine fluorescein, dansyl chloride or phycoerythrin; an example of a luminescent material includes luminol; examples of bioluminescent materials include luciferase, luciferin, and aequorin; and examples of suitable radioactive material include 125I, 131I, 111In or 99Tc.

[0504] Further, an antibody or fragment thereof may be conjugated to a therapeutic moiety such as a cytotoxin, e.g., a cytostatic or cytocidal agent, a therapeutic agent or a radioactive metal ion, e.g., alpha-emitters such as, for example, 213Bi. A cytotoxin or cytotoxic agent includes any agent that is detrimental to cells. Examples include paclitaxol, cytochalasin B, gramicidin D, ethidium bromide, emetine, mitomycin, etoposide, tenoposide, vincristine, vinblastine, colchicin, doxorubicin, daunorubicin, dihydroxy anthracin dione, mitoxantrone, mithramycin, actinomycin D, 1-dehydrotestosterone, glucocorticoids, procaine, tetracaine, lidocaine, propranolol, and puromycin and analogs or homologues thereof. Therapeutic agents include, but are not limited to, antimetabolites (e.g., methotrexate, 6-mercaptopurine, 6-thioguanine, cytarabine, 5-fluorouracil decarbazine), alkylating agents (e.g., mechlorethamine, thioepa chlorambucil, melphalan, carmustine (BSNU) and lomustine (CCNU), cyclothosphamide, busulfan, dibromomannitol, streptozotocin, mitomycin C, and cis-dichlorodiamine platinum (II) (DDP) cisplatin), anthracyclines (e.g., daunorubicin (formerly daunomycin) and doxorubicin), antibiotics (e.g., dactinomycin (formerly actinomycin), bleomycin, mithramycin, and anthramycin (AMC)), and anti-mitotic agents (e.g., vincristine and vinblastine).

[0505] The conjugates of the invention can be used for modifying a given biological response, the therapeutic agent or drug moiety is not to be construed as limited to classical chemical therapeutic agents. For example, the drug moiety may be a protein or polypeptide possessing a desired biological activity. Such proteins may include, for example, a toxin such as abrin, ricin A, pseudomonas exotoxin, or diphtheria toxin; a protein such as tumor necrosis factor, a-interferon, β-interferon, nerve growth factor, platelet derived growth factor, tissue plasminogen activator, an apoptotic agent, e.g., TNF-alpha, TNF-beta, AIM I (See, International Publication No. WO 97/33899), AIM II (See, International Publication No. WO 97/34911), Fas Ligand (Takahashi et al., Int. Immunol., 6:1567-1574 (1994)), VEGI (See, International Publication No. WO 99/23105), a thrombotic agent or an anti- angiogenic agent, e.g., angiostatin or endostatin; or, biological response modifiers such as, for example, lymphokines, interleukin-1 (“IL-1”), interleukin-2 (“IL-2”), interleukin-6 (“IL-6”), granulocyte macrophage colony stimulating factor (“GM-CSF”), granulocyte colony stimulating factor (“G-CSF”), or other growth factors.

[0506] Antibodies may also be attached to solid supports, which are particularly useful for immunoassays or purification of the target antigen. Such solid supports include, but are not limited to, glass, cellulose, polyacrylamide, nylon, polystyrene, polyvinyl chloride or polypropylene.

[0507] Techniques for conjugating such therapeutic moiety to antibodies are well known, see, e.g., Arnon et al., “Monoclonal Antibodies For Immunotargeting Of Drugs In Cancer Therapy”, in Monoclonal Antibodies And Cancer Therapy, Reisfeld et al. (eds.), pp. 243-56 (Alan R. Liss, Inc. 1985); Hellstrom et al., “Antibodies For Drug Delivery”, in Controlled Drug Delivery (2nd Ed.), Robinson et al. (eds.), pp. 623-53 (Marcel Dekker, Inc. 1987); Thorpe, “Antibody Carriers Of Cytotoxic Agents In Cancer Therapy: A Review”, in Monoclonal Antibodies '84: Biological And Clinical Applications, Pinchera et al. (eds.), pp. 475-506 (1985); “Analysis, Results, And Future Prospective Of The Therapeutic Use Of Radiolabeled Antibody In Cancer Therapy”, in Monoclonal Antibodies For Cancer Detection And Therapy, Baldwin et al. (eds.), pp. 303-16 (Academic Press 1985), and Thorpe et al., “The Preparation And Cytotoxic Properties Of Antibody-Toxin Conjugates”, Immunol. Rev. 62:119-58 (1982).

[0508] Alternatively, an antibody can be conjugated to a second antibody to form an antibody heteroconjugate as described by Segal in U.S. Pat. No. 4,676,980, which is incorporated herein by reference in its entirety.

[0509] An antibody, with or without a therapeutic moiety conjugated to it, administered alone or in combination with cytotoxic factor(s) and/or cytokine(s) can be used as a therapeutic.

[0510] Uses for Antibodies directed against polypeptides of the invention

[0511] The antibodies of the present invention have various utilities. For example, such antibodies may be used in diagnostic assays to detect the presence or quantification of the polypeptides of the invention in a sample. Such a diagnostic assay may be comprised of at least two steps. The first, subjecting a sample with the antibody, wherein the sample is a tissue (e.g., human, animal, etc.), biological fluid (e.g., blood, urine, sputum, semen, amniotic fluid, saliva, etc.), biological extract (e.g., tissue or cellular homogenate, etc.), a protein microchip (e.g., See Arenkov P, et al., Anal Biochem., 278(2):123-131 (2000)), or a chromatography column, etc. And a second step involving the quantification of antibody bound to the substrate. Alternatively, the method may additionally involve a first step of attaching the antibody, either covalently, electrostatically, or reversibly, to a solid support, and a second step of subjecting the bound antibody to the sample, as defined above and elsewhere herein.

[0512] Various diagnostic assay techniques are known in the art, such as competitive binding assays, direct or indirect sandwich assays and immunoprecipitation assays conducted in either heterogeneous or homogenous phases (Zola, Monoclonal Antibodies: A Manual of Techniques, CRC Press, Inc., (1987), pp147-158). The antibodies used in the diagnostic assays can be labeled with a detectable moiety. The detectable moiety should be capable of producing, either directly or indirectly, a detectable signal. For example, the detectable moiety may be a radioisotope, such as 2H, 14C, 32P, or 1251, a florescent or chemiluminescent compound, such as fluorescein isothiocyanate, rhodamine, or luciferin, or an enzyme, such as alkaline phosphatase, beta-galactosidase, green fluorescent protein, or horseradish peroxidase. Any method known in the art for conjugating the antibody to the detectable moiety may be employed, including those methods described by Hunter et al., Nature, 144:945 (1962); Dafvid et al., Biochem., 13:1014 (1974); Pain et al., J. Immunol. Metho., 40:219(1981); and Nygren, J. Histochem. And Cytochem., 30:407 (1982).

[0513] Antibodies directed against the polypeptides of the present invention are useful for the affinity purification of such polypeptides from recombinant cell culture or natural sources. In this process, the antibodies against a particular polypeptide are immobilized on a suitable support, such as a Sephadex resin or filter paper, using methods well known in the art. The immobilized antibody then is contacted with a sample containing the polypeptides to be purified, and thereafter the support is washed with a suitable solvent that will remove substantially all the material in the sample except for the desired polypeptides, which are bound to the immobilized antibody. Finally, the support is washed with another suitable solvent that will release the desired polypeptide from the antibody.

[0514] Immunophenotyping

[0515] The antibodies of the invention may be utilized for immunophenotyping of cell lines and biological samples. The translation product of the gene of the present invention may be useful as a cell specific marker, or more specifically as a cellular marker that is differentially expressed at various stages of differentiation and/or maturation of particular cell types. Monoclonal antibodies directed against a specific epitope, or combination of epitopes, will allow for the screening of cellular populations expressing the marker. Various techniques can be utilized using monoclonal antibodies to screen for cellular populations expressing the marker(s), and include magnetic separation using antibody-coated magnetic beads, “panning” with antibody attached to a solid matrix (i.e., plate), and flow cytometry (See, e.g., U.S. Pat. No. 5,985,660; and Morrison et al., Cell, 96:737-49 (1999)).

[0516] These techniques allow for the screening of particular populations of cells, such as might be found with hematological malignancies (i.e. minimal residual disease (MRD) in acute leukemic patients) and “non-self” cells in transplantations to prevent Graft-versus-Host Disease (GVHD). Alternatively, these techniques allow for the screening of hematopoietic stem and progenitor cells capable of undergoing proliferation and/or differentiation, as might be found in human umbilical cord blood.

[0517] Assays For Antibody Binding

[0518] The antibodies of the invention may be assayed for immunospecific binding by any method known in the art. The immunoassays which can be used include but are not limited to competitive and non-competitive assay systems using techniques such as western blots, radioimmunoassays, ELISA (enzyme linked immunosorbent assay), “sandwich” immunoassays, immunoprecipitation assays, precipitin reactions, gel diffusion precipitin reactions, immunodiffusion assays, agglutination assays, complement-fixation assays, immunoradiometric assays, fluorescent immunoassays, protein A immunoassays, to name but a few. Such assays are routine and well known in the art (see, e.g., Ausubel et al, eds, 1994, Current Protocols in Molecular Biology, Vol. 1, John Wiley & Sons, Inc., New York, which is incorporated by reference herein in its entirety). Exemplary immunoassays are described briefly below (but are not intended by way of limitation).

[0519] Immunoprecipitation protocols generally comprise lysing a population of cells in a lysis buffer such as RIPA buffer (1% NP-40 or Triton X- 100, 1% sodium deoxycholate, 0.1% SDS, 0.15 M NaCl, 0.01 M sodium phosphate at pH 7.2, 1% Trasylol) supplemented with protein phosphatase and/or protease inhibitors (e.g., EDTA, PMSF, aprotinin, sodium vanadate), adding the antibody of interest to the cell lysate, incubating for a period of time (e.g., 1-4 hours) at 4° C., adding protein A and/or protein G sepharose beads to the cell lysate, incubating for about an hour or more at 4° C., washing the beads in lysis buffer and resuspending the beads in SDS/sample buffer. The ability of the antibody of interest to immunoprecipitate a particular antigen can be assessed by, e.g., western blot analysis. One of skill in the art would be knowledgeable as to the parameters that can be modified to increase the binding of the antibody to an antigen and decrease the background (e.g., pre-clearing the cell lysate with sepharose beads). For further discussion regarding immunoprecipitation protocols see, e.g., Ausubel et al, eds, 1994, Current Protocols in Molecular Biology, Vol. 1, John Wiley & Sons, Inc., New York at 10.16.1.

[0520] Western blot analysis generally comprises preparing protein samples, electrophoresis of the protein samples in a polyacrylamide gel (e.g., 8%- 20% SDS-PAGE depending on the molecular weight of the antigen), transferring the protein sample from the polyacrylamide gel to a membrane such as nitrocellulose, PVDF or nylon, blocking the membrane in blocking solution (e.g., PBS with 3% BSA or non-fat milk), washing the membrane in washing buffer (e.g., PBS-Tween 20), blocking the membrane with primary antibody (the antibody of interest) diluted in blocking buffer, washing the membrane in washing buffer, blocking the membrane with a secondary antibody (which recognizes the primary antibody, e.g., an anti-human antibody) conjugated to an enzymatic substrate (e.g., horseradish peroxidase or alkaline phosphatase) or radioactive molecule (e.g., 32P or 1251) diluted in blocking buffer, washing the membrane in wash buffer, and detecting the presence of the antigen. One of skill in the art would be knowledgeable as to the parameters that can be modified to increase the signal detected and to reduce the background noise. For further discussion regarding western blot protocols see, e.g., Ausubel et al, eds, 1994, Current Protocols in Molecular Biology, Vol. 1, John Wiley & Sons, Inc., New York at 10.8.1.

[0521] ELISAs comprise preparing antigen, coating the well of a 96 well microtiter plate with the antigen, adding the antibody of interest conjugated to a detectable compound such as an enzymatic substrate (e.g., horseradish peroxidase or alkaline phosphatase) to the well and incubating for a period of time, and detecting the presence of the antigen. In ELISAs the antibody of interest does not have to be conjugated to a detectable compound; instead, a second antibody (which recognizes !the antibody of interest) conjugated to a detectable compound may be added to the well. Further, instead of coating the well with the antigen, the antibody may be coated to the well. In this case, a second antibody conjugated to a detectable compound may be added following the addition of the antigen of interest to the coated well. One of skill in the art would be knowledgeable as to the parameters that can be modified to increase the signal detected as well as other variations of ELISAs known in the art. For further discussion regarding ELISAs see, e.g., Ausubel et al, eds, 1994, Current Protocols in Molecular Biology, Vol. 1, John Wiley & Sons, Inc., New York at 11.2.1.

[0522] The binding affinity of an antibody to an antigen and the off-rate of an antibody-antigen interaction can be determined by competitive binding assays. One example of a competitive binding assay is a radioimmunoassay comprising the incubation of labeled antigen (e.g., 3H or 125I) with the antibody of interest in the presence of increasing amounts of unlabeled antigen, and the detection of the antibody bound to the labeled antigen. The affinity of the antibody of interest for a particular antigen and the binding off-rates can be determined from the data by scatchard plot analysis. Competition with a second antibody can also be determined using radioimmunoassays. In this case, the antigen is incubated with antibody of interest conjugated to a labeled compound (e.g., 3H or 125I) in the presence of increasing amounts of an unlabeled second antibody.

[0523] Therapeutic Uses Of Antibodies

[0524] The present invention is further directed to antibody-based therapies which involve administering antibodies of the invention to an animal, preferably a mammal, and most preferably a human, patient for treating one or more of the disclosed diseases, disorders, or conditions. Therapeutic compounds of the invention include, but are not limited to, antibodies of the invention (including fragments, analogs and derivatives thereof as described herein) and nucleic acids encoding antibodies of the invention (including fragments, analogs and derivatives thereof and anti-idiotypic antibodies as described herein). The antibodies of the invention can be used to treat, inhibit or prevent diseases, disorders or conditions associated with aberrant expression and/or activity of a polypeptide of the invention, including, but not limited to, any one or more of the diseases, disorders, or conditions described herein. The treatment and/or prevention of diseases, disorders, or conditions associated with aberrant expression and/or activity of a polypeptide of the invention includes, but is not limited to, alleviating symptoms associated with those diseases, disorders or conditions. Antibodies of the invention may be provided in pharmaceutically acceptable compositions as known in the art or as described herein.

[0525] A summary of the ways in which the antibodies of the present invention may be used therapeutically includes binding polynucleotides or polypeptides of the present invention locally or systemically in the body or by direct cytotoxicity of the antibody, e.g. as mediated by complement (CDC) or by effector cells (ADCC). Some of these approaches are described in more detail below. Armed with the teachings provided herein, one of ordinary skill in the art will know how to use the antibodies of the present invention for diagnostic, monitoring or therapeutic purposes without undue experimentation.

[0526] The antibodies of this invention may be advantageously utilized in combination with other monoclonal or chimeric antibodies, or with lymphokines or hematopoietic growth factors (such as, e.g., IL-2, IL-3 and IL-7), for example, which serve to increase the number or activity of effector cells which interact with the antibodies.

[0527] The antibodies of the invention may be administered alone or in combination with other types of treatments (e.g., radiation therapy, chemotherapy, hormonal therapy, immunotherapy and anti-tumor agents). Generally, administration of products of a species origin or species reactivity (in the case of antibodies) that is the same species as that of the patient is preferred. Thus, in a preferred embodiment, human antibodies, fragments derivatives, analogs, or nucleic acids, are administered to a human patient for therapy or prophylaxis.

[0528] It is preferred to use high affinity and/or potent in vivo inhibiting and/or neutralizing antibodies against polypeptides or polynucleotides of the present invention, fragments or regions thereof, for both immunoassays directed to and therapy of disorders related to polynucleotides or polypeptides, including fragments thereof, of the present invention. Such antibodies, fragments, or regions, will preferably have an affinity for polynucleotides or polypeptides of the invention, including fragments thereof. Preferred binding affinities include those with a dissociation constant or Kd less than 5×10-2 M, 10-2 M, 5×10-3 M, 10-3 M, 5×10-4 M, 10-4 M, 5×10-5 M, 10-5 M, 5×10-6 M, 10-6 M, 5×10-7 M, 10-7 M, 5×10-8 M, 10-8 M, 5×10-9 M, 10-9 M, 5×10-10 M, 10-10 M, 5×10-11 M, 10-11 M, 5×10-12 M, 10-12 M, 5×10-13 M, 10- 13 M, 5×10-14 M, 10-14 M, 5×10-15 M, and 10-15 M.

[0529] Antibodies directed against polypeptides of the present invention are useful for inhibiting allergic reactions in animals. For example, by administering a therapeutically acceptable dose of an antibody, or antibodies, of the present invention, or a cocktail of the present antibodies, or in combination with other antibodies of varying sources, the animal may not elicit an allergic response to antigens.

[0530] Likewise, one could envision cloning the gene encoding an antibody directed against a polypeptide of the present invention, said polypeptide having the potential to elicit an allergic and/or immune response in an organism, and transforming the organism with said antibody gene such that it is expressed (e.g., constitutively, inducibly, etc.) in the organism. Thus, the organism would effectively become resistant to an allergic response resulting from the ingestion or presence of such an immune/allergic reactive polypeptide. Moreover, such a use of the antibodies of the present invention may have particular utility in preventing and/or ameliorating autoimmune diseases and/or disorders, as such conditions are typically a result of antibodies being directed against endogenous proteins. For example, in the instance where the polypeptide of the present invention is responsible for modulating the immune response to auto-antigens, transforming the organism and/or individual with a construct comprising any of the promoters disclosed herein or otherwise known in the art, in addition, to a polynucleotide encoding the antibody directed against the polypeptide of the present invention could effective inhibit the organisms immune system from eliciting an immune response to the auto-antigen(s). Detailed descriptions of therapeutic and/or gene therapy applications of the present invention are provided elsewhere herein.

[0531] Alternatively, antibodies of the present invention could be produced in a plant (e.g., cloning the gene of the antibody directed against a polypeptide of the present invention, and transforming a plant with a suitable vector comprising said gene for constitutive expression of the antibody within the plant), and the plant subsequently ingested by an animal, thereby conferring temporary immunity to the animal for the specific antigen the antibody is directed towards (See, for example, U.S. Pat. Nos. 5,914,123 and 6,034,298).

[0532] In another embodiment, antibodies of the present invention, preferably polyclonal antibodies, more preferably monoclonal antibodies, and most preferably single-chain antibodies, can be used as a means of inhibiting gene expression of a particular gene, or genes, in a human, mammal, and/or other organism. See, for example, International Publication Number WO 00/05391, published 2/3/00, to Dow Agrosciences LLC. The application of such methods for the antibodies of the present invention are known in the art, and are more particularly described elsewhere herein.

[0533] In yet another embodiment, antibodies of the present invention may be useful for multimerizing the polypeptides of the present invention. For example, certain proteins may confer enhanced biological activity when present in a multimeric state (i.e., such enhanced activity may be due to the increased effective concentration of such proteins whereby more protein is available in a localized location).

[0534] Antibody-based Gene Therapy

[0535] In a specific embodiment, nucleic acids comprising sequences encoding antibodies or functional derivatives thereof, are administered to treat, inhibit or prevent a disease or disorder associated with aberrant expression and/or activity of a polypeptide of the invention, by way of gene therapy. Gene therapy refers to therapy performed by the administration to a subject of an expressed or expressible nucleic acid. In this embodiment of the invention, the nucleic acids produce their encoded protein that mediates a therapeutic effect.

[0536] Any of the methods for gene therapy available in the art can be used according to the present invention. Exemplary methods are described below.

[0537] For general reviews of the methods of gene therapy, see Goldspiel et al., Clinical Pharmacy 12:488-505 (1993); Wu and Wu, Biotherapy 3:87-95 (1991); Tolstoshev, Ann. Rev. Pharmacol. Toxicol. 32:573-596 (1993); Mulligan, Science 260:926-932 (1993); and Morgan and Anderson, Ann. Rev. Biochem. 62:191-217 (1993); May, TIBTECH 11(5):155-215 (1993). Methods commonly known in the art of recombinant DNA technology which can be used are described in Ausubel et al. (eds.), Current Protocols in Molecular Biology, John Wiley & Sons, N.Y. (1993); and Kriegler, Gene Transfer and Expression, A Laboratory Manual, Stockton Press, N.Y. (1990).

[0538] In a preferred aspect, the compound comprises nucleic acid sequences encoding an antibody, said nucleic acid sequences being part of expression vectors that express the antibody or fragments or chimeric proteins or heavy or light chains thereof in a suitable host. In particular, such nucleic acid sequences have promoters operably linked to the antibody coding region, said promoter being inducible or constitutive, and, optionally, tissue- specific. In another particular embodiment, nucleic acid molecules are used in which the antibody coding sequences and any other desired sequences are flanked by regions that promote homologous recombination at a desired site in the genome, thus providing for intrachromosomal expression of the antibody encoding nucleic acids (Koller and Smithies, Proc. Natl. Acad. Sci. USA 86:8932-8935 (1989); Zijlstra et al., Nature 342:435-438 (1989). In specific embodiments, the expressed antibody molecule is a single chain antibody; alternatively, the nucleic acid sequences include sequences encoding both the heavy and light chains, or fragments thereof, of the antibody.

[0539] Delivery of the nucleic acids into a patient may be either direct, in which case the patient is directly exposed to the nucleic acid or nucleic acid- carrying vectors, or indirect, in which case, cells are first transformed with the nucleic acids in vitro, then transplanted into the patient. These two approaches are known, respectively, as in vivo or ex vivo gene therapy.

[0540] In a specific embodiment, the nucleic acid sequences are directly administered in vivo, where it is expressed to produce the encoded product. This can be accomplished by any of numerous methods known in the art, e.g., by constructing them as part of an appropriate nucleic acid expression vector and administering it so that they become intracellular, e.g., by infection using defective or attenuated retrovirals or other viral vectors (see U.S. Pat. No. 4,980,286), or by direct injection of naked DNA, or by use of microparticle bombardment (e.g., a gene gun; Biolistic, Dupont), or coating with lipids or cell-surface receptors or transfecting agents, encapsulation in liposomes, microparticles, or microcapsules, or by administering them in linkage to a peptide which is known to enter the nucleus, by administering it in linkage to a ligand subject to receptor-mediated endocytosis (see, e.g., Wu and Wu, J. Biol. Chem.. 262:4429-4432 (1987)) (which can be used to target cell types specifically expressing the receptors), etc. In another embodiment, nucleic acid-ligand complexes can be formed in which the ligand comprises a fusogenic viral peptide to disrupt endosomes, allowing the nucleic acid to avoid lysosomal degradation. In yet another embodiment, the nucleic acid can be targeted in vivo for cell specific uptake and expression, by targeting a specific receptor (see, e.g., PCT Publications WO 92/06180; WO 92/22635; WO92/20316; WO93/14188, WO 93/20221). Alternatively, the nucleic acid can be introduced intracellularly and incorporated within host cell DNA for expression, by homologous recombination (Koller and Smithies, Proc. Natl. Acad. Sci. USA 86:8932-8935 (1989); Zijlstra et al., Nature 342:435-438 (1989)).

[0541] In a specific embodiment, viral vectors that contains nucleic acid sequences encoding an antibody of the invention are used. For example, a retroviral vector can be used (see Miller et al., Meth. Enzymol. 217:581-599 (1993)). These retroviral vectors contain the components necessary for the correct packaging of the viral genome and integration into the host cell DNA. The nucleic acid sequences encoding the antibody to be used in gene therapy are cloned into one or more vectors, which facilitates delivery of the gene into a patient. More detail about retroviral vectors can be found in Boesen et al., Biotherapy 6:291-302 (1994), which describes the use of a retroviral vector to deliver the mdrl gene to hematopoietic stem cells in order to make the stem cells more resistant to chemotherapy. Other references illustrating the use of retroviral vectors in gene therapy are: Clowes et al., J. Clin. Invest. 93:644-651 (1994); Kiem et al., Blood 83:1467-1473 (1994); Salmons and Gunzberg, Human Gene Therapy 4:129-141 (1993); and Grossman and Wilson, Curr. Opin. in Genetics and Devel. 3:110-114 (1993).

[0542] Adenoviruses are other viral vectors that can be used in gene therapy. Adenoviruses are especially attractive vehicles for delivering genes to respiratory epithelia. Adenoviruses naturally infect respiratory epithelia where they cause a mild disease. Other targets for adenovirus-based delivery systems are liver, the central nervous system, endothelial cells, and muscle. Adenoviruses have the advantage of being capable of infecting non-dividing cells. Kozarsky and Wilson, Current Opinion in Genetics and Development 3:499-503 (1993) present a review of adenovirus-based gene therapy. Bout et al., Human Gene Therapy 5:3-10 (1994) demonstrated the use of adenovirus vectors to transfer genes to the respiratory epithelia of rhesus monkeys. Other instances of the use of adenoviruses in gene therapy can be found in Rosenfeld et al., Science 252:431-434 (1991); Rosenfeld et al., Cell 68:143- 155 (1992); Mastrangeli et al., J. Clin. Invest. 91:225-234 (1993); PCT Publication WO94/12649; and Wang, et al., Gene Therapy 2:775-783 (1995). In a preferred embodiment, adenovirus vectors are used.

[0543] Adeno-associated virus (AAV) has also been proposed for use in gene therapy (Walsh et al., Proc. Soc. Exp. Biol. Med. 204:289-300 (1993); U.S. Pat. No. 5,436,146).

[0544] Another approach to gene therapy involves transferring a gene to cells in tissue culture by such methods as electroporation, lipofection, calcium phosphate mediated transfection, or viral infection. Usually, the method of transfer includes the transfer of a selectable marker to the cells. The cells are then placed under selection to isolate those cells that have taken up and are expressing the transferred gene. Those cells are then delivered to a patient.

[0545] In this embodiment, the nucleic acid is introduced into a cell prior to administration in vivo of the resulting recombinant cell. Such introduction can be carried out by any method known in the art, including but not limited to transfection, electroporation, microinjection, infection with a viral or bacteriophage vector containing the nucleic acid sequences, cell fusion, chromosome-mediated gene transfer, microcell-mediated gene transfer, spheroplast fusion, etc. Numerous techniques are known in the art for the introduction of foreign genes into cells (see, e.g., Loeffler and Behr, Meth. Enzymol. 217:599-618 (1993); Cohen et al., Meth. Enzymol. 217:618-644 (1993); Cline, Pharmac. Ther. 29:69-92m (1985) and may be used in accordance with the present invention, provided that the necessary developmental and physiological functions of the recipient cells are not disrupted. The technique should provide for the stable transfer of the nucleic acid to the cell, so that the nucleic acid is expressible by the cell and preferably heritable and expressible by its cell progeny.

[0546] The resulting recombinant cells can be delivered to a patient by various methods known in the art. Recombinant blood cells (e.g., hematopoietic stem or progenitor cells) are preferably administered intravenously. The amount of cells envisioned for use depends on the desired effect, patient state, etc., and can be determined by one skilled in the art.

[0547] Cells into which a nucleic acid can be introduced for purposes of gene therapy encompass any desired, available cell type, and include but are not limited to epithelial cells, endothelial cells, keratinocytes, fibroblasts, muscle cells, hepatocytes; blood cells such as Tlymphocytes, Blymphocytes, monocytes, macrophages, neutrophils, eosinophils, megakaryocytes, granulocytes; various stem or progenitor cells, in particular hematopoietic stem or progenitor cells, e.g., as obtained from bone marrow, umbilical cord blood, peripheral blood, fetal liver, etc.

[0548] In a preferred embodiment, the cell used for gene therapy is autologous to the patient.

[0549] In an embodiment in which recombinant cells are used in gene therapy, nucleic acid sequences encoding an antibody are introduced into the cells such that they are expressible by the cells or their progeny, and the recombinant cells are then administered in vivo for therapeutic effect. In a specific embodiment, stem or progenitor cells are used. Any stem and/or progenitor cells which can be isolated and maintained in vitro can potentially be used in accordance with this embodiment of the present invention (see e.g. PCT Publication WO 94/08598; Stemple and Anderson, Cell 71:973-985 (1992); Rheinwald, Meth. Cell Bio. 21A:229 (1980); and Pittelkow and Scott, Mayo Clinic Proc. 61:771 (1986)).

[0550] In a specific embodiment, the nucleic acid to be introduced for purposes of gene therapy comprises an inducible promoter operably linked to the coding region, such that expression of the nucleic acid is controllable by controlling the presence or absence of the appropriate inducer of transcription. Demonstration of Therapeutic or

[0551] Prophylactic Activity

[0552] The compounds or pharmaceutical compositions of the invention are preferably tested in vitro, and then in vivo for the desired therapeutic or prophylactic activity, prior to use in humans. For example, in vitro assays to demonstrate the therapeutic or prophylactic utility of a compound or pharmaceutical composition include, the effect of a compound on a cell line or a patient tissue sample. The effect of the compound or composition on the cell line and/or tissue sample can be determined utilizing techniques known to those of skill in the art including, but not limited to, rosette formation assays and cell lysis assays. In accordance with the invention, in vitro assays which can be used to determine whether administration of a specific compound is indicated, include in vitro cell culture assays in which a patient tissue sample is grown in culture, and exposed to or otherwise administered a compound, and the effect of such compound upon the tissue sample is observed.

[0553] Therapeutic/Prophylactic Administration and Compositions

[0554] The invention provides methods of treatment, inhibition and prophylaxis by administration to a subject of an effective amount of a compound or pharmaceutical composition of the invention, preferably an antibody of the invention. In a preferred aspect, the compound is substantially purified (e.g., substantially free from substances that limit its effect or produce undesired side-effects). The subject is preferably an animal, including but not limited to animals such as cows, pigs, horses, chickens, cats, dogs, etc., and is preferably a mammal, and most preferably human.

[0555] Formulations and methods of administration that can be employed when the compound comprises a nucleic acid or an immunoglobulin are described above; additional appropriate formulations and routes of administration can be selected from among those described herein below.

[0556] Various delivery systems are known and can be used to administer a compound of the invention, e.g., encapsulation in liposomes, microparticles, microcapsules, recombinant cells capable of expressing the compound, receptor-mediated endocytosis (see, e.g., Wu and Wu, J. Biol. Chem. 262:4429-4432 (1987)), construction of a nucleic acid as part of a retroviral or other vector, etc. Methods of introduction include but are not limited to intradermal, intramuscular, intraperitoneal, intravenous, subcutaneous, intranasal, epidural, and oral routes. The compounds or compositions may be administered by any convenient route, for example by infusion or bolus injection, by absorption through epithelial or mucocutaneous linings (e.g., oral mucosa, rectal and intestinal mucosa, etc.) and may be administered together with other biologically active agents. Administration can be systemic or local. In addition, it may be desirable to introduce the pharmaceutical compounds or compositions of the invention into the central nervous system by any suitable route, including intraventricular and intrathecal injection; intraventricular injection may be facilitated by an intraventricular catheter, for example, attached to a reservoir, such as an Ommaya reservoir. Pulmonary administration can also be employed, e.g., by use of an inhaler or nebulizer, and formulation with an aerosolizing agent.

[0557] In a specific embodiment, it may be desirable to administer the pharmaceutical compounds or compositions of the invention locally to the area in need of treatment; this may be achieved by, for example, and not by way of limitation, local infusion during surgery, topical application, e.g., in conjunction with a wound dressing after surgery, by injection, by means of a catheter, by means of a suppository, or by means of an implant, said implant being of a porous, non-porous, or gelatinous material, including membranes, such as sialastic membranes, or fibers. Preferably, when administering a protein, including an antibody, of the invention, care must be taken to use materials to which the protein does not absorb.

[0558] In another embodiment, the compound or composition can be delivered in a vesicle, in particular a liposome (see Langer, Science 249:1527-1533 (1990); Treat et al., in Liposomes in the Therapy of Infectious Disease and Cancer, Lopez-Berestein and Fidler (eds.), Liss, New York, pp. 353- 365 (1989); Lopez-Berestein, ibid., pp. 317-327; see generally ibid.)

[0559] In yet another embodiment, the compound or composition can be delivered in a controlled release system. In one embodiment, a pump may be used (see Langer, supra; Sefton, CRC Crit. Ref. Biomed. Eng. 14:201 (1987); Buchwald et al., Surgery 88:507 (1980); Saudek et al., N. Engl. J. Med. 321:574 (1989)). In another embodiment, polymeric materials can be used (see Medical Applications of Controlled Release, Langer and Wise (eds.), CRC Pres., Boca Raton, Florida (1974); Controlled Drug Bioavailability, Drug Product Design and Performance, Smolen and Ball (eds.), Wiley, New York (1984); Ranger and Peppas, J., Macromol. Sci. Rev. Macromol. Chem. 23:61 (1983); see also Levy et al., Science 228:190 (1985); During et al., Ann. Neurol. 25:351 (1989); Howard et al., J. Neurosurg. 71:105 (1989)). In yet another embodiment, a controlled release system can be placed in proximity of the therapeutic target, i.e., the brain, thus requiring only a fraction of the systemic dose (see, e.g., Goodson, in Medical Applications of Controlled Release, supra, vol. 2, pp. 115-138(1984)).

[0560] Other controlled release systems are discussed in the review by Langer (Science 249:1527-1533 (1990)).

[0561] In a specific embodiment where the compound of the invention is a nucleic acid encoding a protein, the nucleic acid can be administered in vivo to promote expression of its encoded protein, by constructing it as part of an appropriate nucleic acid expression vector and administering it so that it becomes intracellular, e.g., by use of a retroviral vector (see U.S. Pat. No. 4,980,286), or by direct injection, or by use of microparticle bombardment (e.g., a gene gun; Biolistic, Dupont), or coating with lipids or cell-surface receptors or transfecting agents, or by administering it in linkage to a homeobox-like peptide which is known to enter the nucleus (see e.g., Joliot et al., Proc. Natl. Acad. Sci. USA 88:1864-1868 (1991)), etc. Alternatively, a nucleic acid can be introduced intracellularly and incorporated within host cell DNA for expression, by homologous recombination.

[0562] The present invention also provides pharmaceutical compositions. Such compositions comprise a therapeutically effective amount of a compound, and a pharmaceutically acceptable carrier. In a specific embodiment, the term “pharmaceutically acceptable” means approved by a regulatory agency of the Federal or a state government or listed in the U.S. Pharmacopeia or other generally recognized pharmacopeia for use in animals, and more particularly in humans. The term “carrier” refers to a diluent, adjuvant, excipient, or vehicle with which the therapeutic is administered. Such pharmaceutical carriers can be sterile liquids, such as water and oils, including those of petroleum, animal, vegetable or synthetic origin, such as peanut oil, soybean oil, mineral oil, sesame oil and the like. Water is a preferred carrier when the pharmaceutical composition is administered intravenously. Saline solutions and aqueous dextrose and glycerol solutions can also be employed as liquid carriers, particularly for injectable solutions. Suitable pharmaceutical excipients include starch, glucose, lactose, sucrose, gelatin, malt, rice, flour, chalk, silica gel, sodium stearate, glycerol monostearate, talc, sodium chloride, dried skim milk, glycerol, propylene, glycol, water, ethanol and the like. The composition, if desired, can also contain minor amounts of wetting or emulsifying agents, or pH buffering agents. These compositions can take the form of solutions, suspensions, emulsion, tablets, pills, capsules, powders, sustained-release formulations and the like. The composition can be formulated as a suppository, with traditional binders and carriers such as triglycerides. Oral formulation can include standard carriers such as pharmaceutical grades of mannitol, lactose, starch, magnesium stearate, sodium saccharine, cellulose, magnesium carbonate, etc. Examples of suitable pharmaceutical carriers are described in “Remington's Pharmaceutical Sciences” by E. W. Martin. Such compositions will contain a therapeutically effective amount of the compound, preferably in purified form, together with a suitable amount of carrier so as to provide the form for proper administration to the patient. The formulation should suit the mode of administration.

[0563] In a preferred embodiment, the composition is formulated in accordance with routine procedures as a pharmaceutical composition adapted for intravenous administration to human beings. Typically, compositions for intravenous administration are solutions in sterile isotonic aqueous buffer. Where necessary, the composition may also include a solubilizing agent and a local anesthetic such as lignocaine to ease pain at the site of the injection. Generally, the ingredients are supplied either separately or mixed together in unit dosage form, for example, as a dry lyophilized powder or water free concentrate in a hermetically sealed container such as an ampoule or sachette indicating the quantity of active agent. Where the composition is to be administered by infusion, it can be dispensed with an infusion bottle containing sterile pharmaceutical grade water or saline. Where the composition is administered by injection, an ampoule of sterile water for injection or saline can be provided so that the ingredients may be mixed prior to administration.

[0564] The compounds of the invention can be formulated as neutral or salt forms. Pharmaceutically acceptable salts include those formed with anions such as those derived from hydrochloric, phosphoric, acetic, oxalic, tartaric acids, etc., and those formed with cations such as those derived from sodium, potassium, ammonium, calcium, ferric hydroxides, isopropylamine, triethylamine, 2-ethylamino ethanol, histidine, procaine, etc.

[0565] The amount of the compound of the invention which will be effective in the treatment, inhibition and prevention of a disease or disorder associated with aberrant expression and/or activity of a polypeptide of the invention can be determined by standard clinical techniques. In addition, in vitro assays may optionally be employed to help identify optimal dosage ranges. The precise dose to be employed in the formulation will also depend on the route of administration, and the seriousness of the disease or disorder, and should be decided according to the judgment of the practitioner and each patient's circumstances. Effective doses may be extrapolated from dose-response curves derived from in vitro or animal model test systems.

[0566] For antibodies, the dosage administered to a patient is typically 0.1 mg/kg to 100 mg/kg of the patient's body weight. Preferably, the dosage administered to a patient is between 0.1 mg/kg and 20 mg/kg of the patient's body weight, more preferably 1 mg/kg to 10 mg/kg of the patient's body weight. Generally, human antibodies have a longer half-life within the human body than antibodies from other species due to the immune response to the foreign polypeptides. Thus, lower dosages of human antibodies and less frequent administration is often possible. Further, the dosage and frequency of administration of antibodies of the invention may be reduced by enhancing uptake and tissue penetration (e.g., into the brain) of the antibodies by modifications such as, for example, lipidation.

[0567] The invention also provides a pharmaceutical pack or kit comprising one or more containers filled with one or more of the ingredients of the pharmaceutical compositions of the invention. Optionally associated with such container(s) can be a notice in the form prescribed by a governmental agency regulating the manufacture, use or sale of pharmaceuticals or biological products, which notice reflects approval by the agency of manufacture, use or sale for human administration.

[0568] Diagnosis and Imaging With Antibodies

[0569] Labeled antibodies, and derivatives and analogs thereof, which specifically bind to a polypeptide of interest can be used for diagnostic purposes to detect, diagnose, or monitor diseases, disorders, and/or conditions associated with the aberrant expression and/or activity of a polypeptide of the invention. The invention provides for the detection of aberrant expression of a polypeptide of interest, comprising (a) assaying the expression of the polypeptide of interest in cells or body fluid of an individual using one or more antibodies specific to the polypeptide interest and (b) comparing the level of gene expression with a standard gene expression level, whereby an increase or decrease in the assayed polypeptide gene expression level compared to the standard expression level is indicative of aberrant expression.

[0570] The invention provides a diagnostic assay for diagnosing a disorder, comprising (a) assaying the expression of the polypeptide of interest in cells or body fluid of an individual using one or more antibodies specific to the polypeptide interest and (b) comparing the level of gene expression with a standard gene expression level, whereby an increase or decrease in the assayed polypeptide gene expression level compared to the standard expression level is indicative of a particular disorder. With respect to cancer, the presence of a relatively high amount of transcript in biopsied tissue from an individual may indicate a predisposition for the development of the disease, or may provide a means for detecting the disease prior to the appearance of actual clinical symptoms. A more definitive diagnosis of this type may allow health professionals to employ preventative measures or aggressive treatment earlier thereby preventing the development or further progression of the cancer.

[0571] Antibodies of the invention can be used to assay protein levels in a biological sample using classical immunohistological methods known to those of skill in the art (e.g., see Jalkanen, et al., J. Cell. Biol. 101:976-985 (1985); Jalkanen, et al., J. Cell . Biol. 105:3087-3096 (1987)). Other antibody-based methods useful for detecting protein gene expression include immunoassays, such as the enzyme linked immunosorbent assay (ELISA) and the radioimmunoassay (RIA). Suitable antibody assay labels are known in the art and include enzyme labels, such as, glucose oxidase; radioisotopes, such as iodine (1251, 1211), carbon (14C), sulfur (35S), tritium (3H), indium (1 12In), and technetium (99Tc); luminescent labels, such as luminol; and fluorescent labels, such as fluorescein and rhodamine, and biotin.

[0572] One aspect of the invention is the detection and diagnosis of a disease or disorder associated with aberrant expression of a polypeptide of interest in an animal, preferably a mammal and most preferably a human. In one embodiment, diagnosis comprises: a) administering (for example, parenterally, subcutaneously, or intraperitoneally) to a subject an effective amount of a labeled molecule which specifically binds to the polypeptide of interest; b) waiting for a time interval following the administering for permitting the labeled molecule to preferentially concentrate at sites in the subject where the polypeptide is expressed (and for unbound labeled molecule to be cleared to background level); c) determining background level; and d) detecting the labeled molecule in the subject, such that detection of labeled molecule above the background level indicates that the subject has a particular disease or disorder associated with aberrant expression of the polypeptide of interest. Background level can be determined by various methods including, comparing the amount of labeled molecule detected to a standard value previously determined for a particular system.

[0573] It will be understood in the art that the size of the subject and the imaging system used will determine the quantity of imaging moiety needed to produce diagnostic images. In the case of a radioisotope moiety, for a human subject, the quantity of radioactivity injected will normally range from about 5 to 20 millicuries of 99mTc. The labeled antibody or antibody fragment will then preferentially accumulate at the location of cells which contain the specific protein. In vivo tumor imaging is described in S. W. Burchiel et al., “Immunopharmacokinetics of Radiolabeled Antibodies and Their Fragments.” (Chapter 13 in Tumor Imaging: The Radiochemical Detection of Cancer, S. W. Burchiel and B. A. Rhodes, eds., Masson Publishing Inc. (1982).

[0574] Depending on several variables, including the type of label used and the mode of administration, the time interval following the administration for permitting the labeled molecule to preferentially concentrate at sites in the subject and for unbound labeled molecule to be cleared to background level is 6 to 48 hours or 6 to 24 hours or 6 to 12 hours. In another embodiment the time interval following administration is 5 to 20 days or 5 to 10 days.

[0575] In an embodiment, monitoring of the disease or disorder is carried out by repeating the method for diagnosing the disease or disease, for example, one month after initial diagnosis, six months after initial diagnosis, one year after initial diagnosis, etc.

[0576] Presence of the labeled molecule can be detected in the patient using methods known in the art for in vivo scanning. These methods depend upon the type of label used. Skilled artisans will be able to determine the appropriate method for detecting a particular label. Methods and devices that may be used in the diagnostic methods of the invention include, but are not limited to, computed tomography (CT), whole body scan such as position emission tomography (PET), magnetic resonance imaging (MRI), and sonography.

[0577] In a specific embodiment, the molecule is labeled with a radioisotope and is detected in the patient using a radiation responsive surgical instrument (Thurston et al., U.S. Pat. No. 5,441,050). In another embodiment, the molecule is labeled with a fluorescent compound and is detected in the patient using a fluorescence responsive scanning instrument. In another embodiment, the molecule is labeled with a positron emitting metal and is detected in the patent using positron emission-tomography. In yet another embodiment, the molecule is labeled with a paramagnetic label and is detected in a patient using magnetic resonance imaging (MRI).

[0578] Kits

[0579] The present invention provides kits that can be used in the above methods. In one embodiment, a kit comprises an antibody of the invention, preferably a purified antibody, in one or more containers. In a specific embodiment, the kits of the present invention contain a substantially isolated polypeptide comprising an epitope which is specifically immunoreactive with an antibody included in the kit. Preferably, the kits of the present invention further comprise a control antibody which does not react with the polypeptide of interest. In another specific embodiment, the kits of the present invention contain a means for detecting the binding of an antibody to a polypeptide of interest (e.g., the antibody may be conjugated to a detectable substrate such as a fluorescent compound, an enzymatic substrate, a radioactive compound or a luminescent compound, or a second antibody which recognizes the first antibody may be conjugated to a detectable substrate).

[0580] In another specific embodiment of the present invention, the kit is a diagnostic kit for use in screening serum containing antibodies specific against proliferative and/or cancerous polynucleotides and polypeptides. Such a kit may include a control antibody that does not react with the polypeptide of interest. Such a kit may include a substantially isolated polypeptide antigen comprising an epitope which is specifically immunoreactive with at least one anti-polypeptide antigen antibody. Further, such a kit includes means for detecting the binding of said antibody to the antigen (e.g., the antibody may be conjugated to a fluorescent compound such as fluorescein or rhodamine which can be detected by flow cytometry). In specific embodiments, the kit may include a recombinantly produced or chemically synthesized polypeptide antigen. The polypeptide antigen of the kit may also be attached to a solid support.

[0581] In a more specific embodiment the detecting means of the above-described kit includes a solid support to which said polypeptide antigen is attached. Such a kit may also include a non-attached reporter-labeled anti-human antibody. In this embodiment, binding of the antibody to the polypeptide antigen can be detected by binding of the said reporter-labeled antibody.

[0582] In an additional embodiment, the invention includes a diagnostic kit for use in screening serum containing antigens of the polypeptide of the invention. The diagnostic kit includes a substantially isolated antibody specifically immunoreactive with polypeptide or polynucleotide antigens, and means for detecting the binding of the polynucleotide or polypeptide antigen to the antibody. In one embodiment, the antibody is attached to a solid support. In a specific embodiment, the antibody may be a monoclonal antibody. The detecting means of the kit may include a second, labeled monoclonal antibody. Alternatively, or in addition, the detecting means may include a labeled, competing antigen.

[0583] In one diagnostic configuration, test serum is reacted with a solid phase reagent having a surface-bound antigen obtained by the methods of the present invention. After binding with specific antigen antibody to the reagent and removing unbound serum components by washing, the reagent is reacted with reporter-labeled anti-human antibody to bind reporter to the reagent in proportion to the amount of bound anti-antigen antibody on the solid support. The reagent is again washed to remove unbound labeled antibody, and the amount of reporter associated with the reagent is determined. Typically, the reporter is an enzyme which is detected by incubating the solid phase in the presence of a suitable fluorometric, luminescent or colorimetric substrate (Sigma, St. Louis, Mo.).

[0584] The solid surface reagent in the above assay is prepared by known techniques for attaching protein material to solid support material, such as polymeric beads, dip sticks, 96-well plate or filter material. These attachment methods generally include non-specific adsorption of the protein to the support or covalent attachment of the protein, typically through a free amine group, to a chemically reactive group on the solid support, such as an activated carboxyl, hydroxyl, or aldehyde group. Alternatively, streptavidin coated plates can be used in conjunction with biotinylated antigen(s).

[0585] Thus, the invention provides an assay system or kit for carrying out this diagnostic method. The kit generally includes a support with surface- bound recombinant antigens, and a reporter-labeled anti-human antibody for detecting surface-bound anti-antigen antibody.

[0586] Fusion Proteins

[0587] Any polypeptide of the present invention can be used to generate fusion proteins. For example, the polypeptide of the present invention, when fused to a second protein, can be used as an antigenic tag. Antibodies raised against the polypeptide of the present invention can be used to indirectly detect the second protein by binding to the polypeptide. Moreover, because certain proteins target cellular locations based on trafficking signals, the polypeptides of the present invention can be used as targeting molecules once fused to other proteins.

[0588] Examples of domains that can be fused to polypeptides of the present invention include not only heterologous signal sequences, but also other heterologous functional regions. The fusion does not necessarily need to be direct, but may occur through linker sequences.

[0589] Moreover, fusion proteins may also be engineered to improve characteristics of the polypeptide of the present invention. For instance, a region of additional amino acids, particularly charged amino acids, may be added to the N-terminus of the polypeptide to improve stability and persistence during purification from the host cell or subsequent handling and storage. Peptide moieties may be added to the polypeptide to facilitate purification. Such regions may be removed prior to final preparation of the polypeptide. Similarly, peptide cleavage sites can be introduced in-between such peptide moieties, which could additionally be subjected to protease activity to remove said peptide(s) from the protein of the present invention. The addition of peptide moieties, including peptide cleavage sites, to facilitate handling of polypeptides are familiar and routine techniques in the art.

[0590] Moreover, polypeptides of the present invention, including fragments, and specifically epitopes, can be combined with parts of the constant domain of immunoglobulins (IgA, IgE, IgG, IgM) or portions thereof (CH1, CH2, CH3, and any combination thereof, including both entire domains and portions thereof), resulting in chimeric polypeptides. These fusion proteins facilitate purification and show an increased half-life in vivo. One reported example describes chimeric proteins consisting of the first two domains of the human CD4-polypeptide and various domains of the constant regions of the heavy or light chains of mammalian immunoglobulins. (EP A 394,827; Traunecker et al., Nature 331:84-86 (1988).) Fusion proteins having disulfide-linked dimeric structures (due to the IgG) can also be more efficient in binding and neutralizing other molecules, than the monomeric secreted protein or protein fragment alone. (Fountoulakis et al., J. Biochem. 270:3958-3964 (1995).)

[0591] Similarly, EP-A-O 464 533 (Canadian counterpart 2045869) discloses fusion proteins comprising various portions of the constant region of immunoglobulin molecules together with another human protein or part thereof. In many cases, the Fc part in a fusion protein is beneficial in therapy and diagnosis, and thus can result in, for example, improved pharmacokinetic properties. (EP-A 0232 262.) Alternatively, deleting the Fc part after the fusion protein has been expressed, detected, and purified, would be desired. For example, the Fc portion may hinder therapy and diagnosis if the fusion protein is used as an antigen for immunizations. In drug discovery, for example, human proteins, such as hIL-5, have been fused with Fc portions for the purpose of high-throughput screening assays to identify antagonists of hIL-5. (See, D. Bennett et al., J. Molecular Recognition 8:52-58 (1995); K. Johanson et al., J. Biol. Chem.. 270:9459-9471 (1995).)

[0592] Moreover, the polypeptides of the present invention can be fused to marker sequences (also referred to as “tags”). Due to the availability of antibodies specific to such “tags”, purification of the fused polypeptide of the invention, and/or its identification is significantly facilitated since antibodies specific to the polypeptides of the invention are not required. Such purification may be in the form of an affinity purification whereby an anti-tag antibody or another type of affinity matrix (e.g., anti-tag antibody attached to the matrix of a flow-thru column) that binds to the epitope tag is present. In preferred embodiments, the marker amino acid sequence is a hexa-histidine peptide, such as the tag provided in a pQE vector (QIAGEN, Inc., 9259 Eton Avenue, Chatsworth, Calif., 91311), among others, many of which are commercially available. As described in Gentz et al., Proc. Natl. Acad. Sci. USA 86:821-824 (1989), for instance, hexa-histidine provides for convenient purification of the fusion protein. Another peptide tag useful for purification, the “HA” tag, corresponds to an epitope derived from the influenza hemagglutinin protein. (Wilson et al., Cell 37:767 (1984)).

[0593] The skilled artisan would acknowledge the existence of other “tags” which could be readily substituted for the tags referred to supra for purification and/or identification of polypeptides of the present invention (Jones C., et al., J Chromatogr A. 707(1):3-22 (1995)). For example, the c-myc tag and the 8F9, 3C7, 6E10, G4m B7 and 9E10 antibodies thereto (Evan et al., Molecular and Cellular Biology 5:3610-3616 (1985)); the Herpes Simplex virus glycoprotein D (gD) tag and its antibody (Paborsky et al., Protein Engineering, 3(6):547-553 (1990), the Flag-peptide—i.e., the octapeptide sequence DYKDDDDK (SEQ ID NO:553), (Hopp et al., Biotech. 6:1204-1210 (1988); the KT3 epitope peptide (Martin et al., Science, 255:192-194 (1992)); α-tubulin epitope peptide (Skinner et al., J. Biol. Chem.., 266:15136-15166, (1991)); the T7 gene 10 protein peptide tag (Lutz-Freyermuth et al., Proc. Natl. Sci. USA, 87:6363-6397 (1990)), the FITC epitope (Zymed, Inc.), the GFP epitope (Zymed, Inc.), and the Rhodamine epitope (Zymed, Inc.).

[0594] The present invention also encompasses the attachment of up to nine codons encoding a repeating series of up to nine arginine amino acids to the coding region of a polynucleotide of the present invention. The invention also encompasses chemically derivitizing a polypeptide of the present invention with a repeating series of up to nine arginine amino acids. Such a tag, when attached to a polypeptide, has recently been shown to serve as a universal pass, allowing compounds access to the interior of cells without additional derivitization or manipulation (Wender, P., et al., unpublished data).

[0595] Protein fusions involving polypeptides of the present invention, including fragments and/or variants thereof, can be used for the following, non-limiting examples, subcellular localization of proteins, determination of protein-protein interactions via immunoprecipitation, purification of proteins via affinity chromatography, functional and/or structural characterization of protein. The present invention also encompasses the application of hapten specific antibodies for any of the uses referenced above for epitope fusion proteins. For example, the polypeptides of the present invention could be chemically derivatized to attach hapten molecules (e.g., DNP, (Zymed, Inc.)). Due to the availability of monoclonal antibodies specific to such haptens, the protein could be readily purified using immunoprecipation, for example.

[0596] Polypeptides of the present invention, including fragments and/or variants thereof, in addition to, antibodies directed against such polypeptides, fragments, and/or variants, may be fused to any of a number of known, and yet to be determined, toxins, such as ricin, saporin (Mashiba H, et al., Ann. N.Y. Acad. Sci. 1999;886:233-5), or HC toxin (Tonukari N.J., et al., Plant Cell. 2000 Feb;12(2):237-248), for example. Such fusions could be used to deliver the toxins to desired tissues for which a ligand or a protein capable of binding to the polypeptides of the invention exists.

[0597] The invention encompasses the fusion of antibodies directed against polypeptides of the present invention, including variants and fragments thereof, to said toxins for delivering the toxin to specific locations in a cell, to specific tissues, and/or to specific species. Such bifunctional antibodies are known in the art, though a review describing additional advantageous fusions, including citations for methods of production, can be found in P. J. Hudson, Curr. Opp. In. Imm. 11:548-557, (1999); this publication, in addition to the references cited therein, are hereby incorporated by reference in their entirety herein. In this context, the term “toxin” may be expanded to include any heterologous protein, a small molecule, radionucleotides, cytotoxic drugs, liposomes, adhesion molecules, glycoproteins, ligands, cell or tissue-specific ligands, enzymes, of bioactive agents, biological response modifiers, anti-fungal agents, hormones, steroids, vitamins, peptides, peptide analogs, anti-allergenic agents, anti-tubercular agents, anti-viral agents, antibiotics, anti-protozoan agents, chelates, radioactive particles, radioactive ions, X-ray contrast agents, monoclonal antibodies, polyclonal antibodies and genetic material. In view of the present disclosure, one skilled in the art could determine whether any particular “toxin” could be used in the compounds of the present invention. Examples of suitable “toxins” listed above are exemplary only and are not intended to limit the “toxins” that may be used in the present invention.

[0598] Thus, any of these above fusions can be engineered using the polynucleotides or the polypeptides of the present invention.

[0599] Vectors, Host Cells, and Protein Production

[0600] The present invention also relates to vectors containing the polynucleotide of the present invention, host cells, and the production of polypeptides by recombinant techniques. The vector may be, for example, a phage, plasmid, viral, or retroviral vector. Retroviral vectors may be replication competent or replication defective. In the latter case, viral propagation generally will occur only in complementing host cells.

[0601] The polynucleotides may be joined to a vector containing a selectable marker for propagation in a host. Generally, a plasmid vector is introduced in a precipitate, such as a calcium phosphate precipitate, or in a complex with a charged lipid. If the vector is a virus, it may be packaged in vitro using an appropriate packaging cell line and then transduced into host cells.

[0602] The polynucleotide insert should be operatively linked to an appropriate promoter, such as the phage lambda PL promoter, the E. coli lac, trp, phoa and tac promoters, the SV40 early and late promoters and promoters of retroviral LTRs, to name a few. Other suitable promoters will be known to the skilled artisan. The expression constructs will further contain sites for transcription initiation, termination, and, in the transcribed region, a ribosome binding site for translation. The coding portion of the transcripts expressed by the constructs will preferably include a translation initiating codon at the beginning and a termination codon (UAA, UGA or UAG) appropriately positioned at the end of the polypeptide to be translated.

[0603] As indicated, the expression vectors will preferably include at least one selectable marker. Such markers include dihydrofolate reductase, G418 or neomycin resistance for eukaryotic cell culture and tetracycline, kanamycin or ampicillin resistance genes for culturing in E. coli and other bacteria. Representative examples of appropriate hosts include, but are not limited to, bacterial cells, such as E. coli, Streptomyces and Salmonella typhimurium cells; fungal cells, such as yeast cells (e.g., Saccharomyces cerevisiae or Pichia pastoris (ATCC Accession No. 201178)); insect cells such as Drosophila S2 and Spodoptera Sf9 cells; animal cells such as CHO, COS, 293, and Bowes melanoma cells; and plant cells. Appropriate culture mediums and conditions for the above-described host cells are known in the art.

[0604] Among vectors preferred for use in bacteria include pQE70, pQE60 and pQE-9, available from QIAGEN, Inc.; pBluescript vectors, Phagescript vectors, pNH8A, pNH16a, pNH18A, pNH46A, available from Stratagene Cloning Systems, Inc.; and ptrc99a, pKK223-3, pKK233-3, pDR540, pRIT5 available from Pharmacia Biotech, Inc. Among preferred eukaryotic vectors are pWLNEO, pSV2CAT, pOG44, pXT1 and pSG available from Stratagene; and pSVK3, pBPV, pMSG and pSVL available from Pharmacia. Preferred expression vectors for use in yeast systems include, but are not limited to pYES2, pYD1, pTEF1/Zeo, pYES2/GS, pPICZ, pGAPZ, pGAPZalph, pPIC9, pPIC3.5, pHIL-D2, pHIL-S1, pPIC3.5K, pPIC9K, and PA0815 (all available from Invitrogen, Carlsbad, Calif.). Other suitable vectors will be readily apparent to the skilled artisan.

[0605] Introduction of the construct into the host cell can be effected by calcium phosphate transfection, DEAE-dextran mediated transfection, cationic lipid-mediated transfection, electroporation, transduction, infection, or other methods. Such methods are described in many standard laboratory manuals, such as Davis et al., Basic Methods In Molecular Biology (1986). It is specifically contemplated that the polypeptides of the present invention may in fact be expressed by a host cell lacking a recombinant vector.

[0606] A polypeptide of this invention can be recovered and purified from recombinant cell cultures by well-known methods including ammonium sulfate or ethanol precipitation, acid extraction, anion or cation exchange chromatography, phosphocellulose chromatography, hydrophobic interaction chromatography, affinity chromatography, hydroxylapatite chromatography and lectin chromatography. Most preferably, high performance liquid chromatography (“HPLC”) is employed for purification.

[0607] Polypeptides of the present invention, and preferably the secreted form, can also be recovered from: products purified from natural sources, including bodily fluids, tissues and cells, whether directly isolated or cultured; products of chemical synthetic procedures; and products produced by recombinant techniques from a prokaryotic or eukaryotic host, including, for example, bacterial, yeast, higher plant, insect, and mammalian cells. Depending upon the host employed in a recombinant production procedure, the polypeptides of the present invention may be glycosylated or may be non-glycosylated. In addition, polypeptides of the invention may also include an initial modified methionine residue, in some cases as a result of host-mediated processes. Thus, it is well known in the art that the N-terminal methionine encoded by the translation initiation codon generally is removed with high efficiency from any protein after translation in all eukaryotic cells. While the N-terminal methionine on most proteins also is efficiently removed in most prokaryotes, for some proteins, this prokaryotic removal process is inefficient, depending on the nature of the amino acid to which the N-terminal methionine is covalently linked.

[0608] In one embodiment, the yeast Pichia pastoris is used to express the polypeptide of the present invention in a eukaryotic system. Pichia pastoris is a methylotrophic yeast which can metabolize methanol as its sole carbon source. A main step in the methanol metabolization pathway is the oxidation of methanol to formaldehyde using O2. This reaction is catalyzed by the enzyme alcohol oxidase. In order to metabolize methanol as its sole carbon source, Pichia pastoris must generate high levels of alcohol oxidase due, in part, to the relatively low affinity of alcohol oxidase for O2. Consequently, in a growth medium depending on methanol as a main carbon source, the promoter region of one of the two alcohol oxidase genes (AOX1) is highly active. In the presence of methanol, alcohol oxidase produced from the AOX1 gene comprises up to approximately 30% of the total soluble protein in Pichia pastoris. See, Ellis, S. B., et al., Mol. Cell. Biol. 5:1111-21 (1985); Koutz, P. J, et al., Yeast 5:167-77 (1989); Tschopp, J. F., et al., Nucl. Acids Res. 15:3859-76 (1987). Thus, a heterologous coding sequence, such as, for example, a polynucleotide of the present invention, under the transcriptional regulation of all or part of the AOX1 regulatory sequence is expressed at exceptionally high levels in Pichia yeast grown in the presence of methanol.

[0609] In one example, the plasmid vector pPIC9K is used to express DNA encoding a polypeptide of the invention, as set forth herein, in a Pichea yeast system essentially as described in “Pichia Protocols: Methods in Molecular Biology,” D. R. Higgins and J. Cregg, eds. The Humana Press, Totowa, N.J., 1998. This expression vector allows expression and secretion of a protein of the invention by virtue of the strong AOX1 promoter linked to the Pichia pastoris alkaline phosphatase (PHO) secretory signal peptide (i.e., leader) located upstream of a multiple cloning site.

[0610] Many other yeast vectors could be used in place of pPIC9K, such as, pYES2, pYD1, pTEF1/Zeo, pYES2/GS, pPICZ, pGAPZ, pGAPZalpha, pPIC9, pPIC3.5, pHEL-D2, pHIL-S1, pPIC3.5K, and PA0815, as one skilled in the art would readily appreciate, as long as the proposed expression construct provides appropriately located signals for transcription, translation, secretion (if desired), and the like, including an in-frame AUG, as required.

[0611] In another embodiment, high-level expression of a heterologous coding sequence, such as, for example, a polynucleotide of the present invention, may be achieved by cloning the heterologous polynucleotide of the invention into an expression vector such as, for example, pGAPZ or pGAPZalpha, and growing the yeast culture in the absence of methanol.

[0612] In addition to encompassing host cells containing the vector constructs discussed herein, the invention also encompasses primary, secondary, and immortalized host cells of vertebrate origin, particularly mammalian origin, that have been engineered to delete or replace endogenous genetic material (e.g., coding sequence), and/or to include genetic material (e.g., heterologous polynucleotide sequences) that is operably associated with the polynucleotides of the invention, and which activates, alters, and/or amplifies endogenous polynucleotides. For example, techniques known in the art may be used to operably associate heterologous control regions (e.g., promoter and/or enhancer) and endogenous polynucleotide sequences via homologous recombination, resulting in the formation of a new transcription unit (see, e.g., U.S. Pat. No. 5,641,670, issued Jun. 24, 1997; U.S. Pat. No. 5,733,761, issued Mar. 31, 1998; International Publication No. WO 96/29411, published Sep. 26, 1996; International Publication No. WO 94/12650, published Aug. 4, 1994; Koller et al., Proc. Natl. Acad. Sci. USA 86:8932-8935 (1989); and Zijlstra et al., Nature 342:435-438 (1989), the disclosures of each of which are incorporated by reference in their entireties).

[0613] In addition, polypeptides of the invention can be chemically synthesized using techniques known in the art (e.g., see Creighton, 1983, Proteins: Structures and Molecular Principles, W. H. Freeman & Co., N.Y., and Hunkapiller et al., Nature, 310:105-111 (1984)). For example, a polypeptide corresponding to a fragment of a polypeptide sequence of the invention can be synthesized by use of a peptide synthesizer. Furthermore, if desired, nonclassical amino acids or chemical amino acid analogs can be introduced as a substitution or addition into the polypeptide sequence. Non-classical amino acids include, but are not limited to, to the D-isomers of the common amino acids, 2,4-diaminobutyric acid, a-amino isobutyric acid, 4-aminobutyric acid, Abu, 2-amino butyric acid, g-Abu, e-Ahx, 6-amino hexanoic acid, Aib, 2-amino isobutyric acid, 3-amino propionic acid, ornithine, norleucine, norvaline, hydroxyproline, sarcosine, citrulline, homocitrulline, cysteic acid, t-butylglycine, t-butylalanine, phenylglycine, cyclohexylalanine, b-alanine, fluoro-amino acids, designer amino acids such as b-methyl amino acids, Ca-methyl amino acids, Na-methyl amino acids, and amino acid analogs in general. Furthermore, the amino acid can be D (dextrorotary) or L (levorotary).

[0614] The invention encompasses polypeptides which are differentially modified during or after translation, e.g., by glycosylation, acetylation, phosphorylation, amidation, derivatization by known protecting/blocking groups, proteolytic cleavage, linkage to an antibody molecule or other cellular ligand, etc. Any of numerous chemical modifications may be carried out by known techniques, including but not limited, to specific chemical cleavage by cyanogen bromide, trypsin, chymotrypsin, papain, V8 protease, NaBH4; acetylation, formylation, oxidation, reduction; metabolic synthesis in the presence of tunicamycin; etc.

[0615] Additional post-translational modifications encompassed by the invention include, for example, e.g., N-linked or O-linked carbohydrate chains, processing of N-terminal or C-terminal ends), attachment of chemical moieties to the amino acid backbone, chemical modifications of N-linked or O-linked carbohydrate chains, and addition or deletion of an N-terminal methionine residue as a result of prokaryotic host cell expression. The polypeptides may also be modified with a detectable label, such as an enzymatic, fluorescent, isotopic or affinity label to allow for detection and isolation of the protein, the addition of epitope tagged peptide fragments (e.g., FLAG, HA, GST, thioredoxin, maltose binding protein, etc.), attachment of affinity tags such as biotin and/or streptavidin, the covalent attachment of chemical moieties to the amino acid backbone, N- or C-terminal processing of the polypeptides ends (e.g., proteolytic processing), deletion of the N-terminal methionine residue, etc.

[0616] Also provided by the invention are chemically modified derivatives of the polypeptides of the invention which may provide additional advantages such as increased solubility, stability and circulating time of the polypeptide, or decreased immunogenicity (see U.S. Pat. No.: 4,179,337). The chemical moieties for derivitization may be selected from water soluble polymers such as polyethylene glycol, ethylene glycol/propylene glycol copolymers, carboxymethylcellulose, dextran, polyvinyl alcohol and the like. The polypeptides may be modified at random positions within the molecule, or at predetermined positions within the molecule and may include one, two, three or more attached chemical moieties.

[0617] The invention further encompasses chemical derivitization of the polypeptides of the present invention, preferably where the chemical is a hydrophilic polymer residue. Exemplary hydrophilic polymers, including derivatives, may be those that include polymers in which the repeating units contain one or more hydroxy groups (polyhydroxy polymers), including, for example, poly(vinyl alcohol); polymers in which the repeating units contain one or more amino groups (polyamine polymers), including, for example, peptides, polypeptides, proteins and lipoproteins, such as albumin and natural lipoproteins; polymers in which the repeating units contain one or more carboxy groups (polycarboxy polymers), including, for example, carboxymethylcellulose, alginic acid and salts thereof, such as sodium and calcium alginate, glycosaminoglycans and salts thereof, including salts of hyaluronic acid, phosphorylated and sulfonated derivatives of carbohydrates, genetic material, such as interleukin-2 and interferon, and phosphorothioate oligomers; and polymers in which the repeating units contain one or more saccharide moieties (polysaccharide polymers), including, for example, carbohydrates.

[0618] The molecular weight of the hydrophilic polymers may vary, and is generally about 50 to about 5,000,000, with polymers having a molecular weight of about 100 to about 50,000 being preferred. The polymers may be branched or unbranched. More preferred polymers have a molecular weight of about 150 to about 10,000, with molecular weights of 200 to about 8,000 being even more preferred.

[0619] For polyethylene glycol, the preferred molecular weight is between about I kDa and about 100 kDa (the term “about” indicating that in preparations of polyethylene glycol, some molecules will weigh more, some less, than the stated molecular weight) for ease in handling and manufacturing. Other sizes may be used, depending on the desired therapeutic profile (e.g., the duration of sustained release desired, the effects, if any on biological activity, the ease in handling, the degree or lack of antigenicity and other known effects of the polyethylene glycol to a therapeutic protein or analog).

[0620] Additional preferred polymers which may be used to derivatize polypeptides of the invention, include, for example, poly(ethylene glycol) (PEG), poly(vinylpyrrolidine), polyoxomers, polysorbate and poly(vinyl alcohol), with PEG polymers being particularly preferred. Preferred among the PEG polymers are PEG polymers having a molecular weight of from about 100 to about 10,000. More preferably, the PEG polymers have a molecular weight of from about 200 to about 8,000, with PEG 2,000, PEG 5,000 and PEG 8,000, which have molecular weights of 2,000, 5,000 and 8,000, respectively, being even more preferred. Other suitable hydrophilic polymers, in addition to those exemplified above, will be readily apparent to one skilled in the art based on the present disclosure. Generally, the polymers used may include polymers that can be attached to the polypeptides of the invention via alkylation or acylation reactions.

[0621] The polyethylene glycol molecules (or other chemical moieties) should be attached to the protein with consideration of effects on functional or antigenic domains of the protein. There are a number of attachment methods available to those skilled in the art, e.g., EP 0 401 384, herein incorporated by reference (coupling PEG to G-CSF), see also Malik et al., Exp. Hematol. 20:1028-1035 (1992) (reporting pegylation of GM-CSF using tresyl chloride). For example, polyethylene glycol may be covalently bound through amino acid residues via a reactive group, such as, a free amino or carboxyl group. Reactive groups are those to which an activated polyethylene glycol molecule may be bound. The amino acid residues having a free amino group may include lysine residues and the N-terminal amino acid residues; those having a free carboxyl group may include aspartic acid residues glutamic acid residues and the C-terminal amino acid residue. Sulfhydryl groups may also be used as a reactive group for attaching the polyethylene glycol molecules. Preferred for therapeutic purposes is attachment at an amino group, such as attachment at the N-terminus or lysine group.

[0622] One may specifically desire proteins chemically modified at the N-terminus. Using polyethylene glycol as an illustration of the present composition, one may select from a variety of polyethylene glycol molecules (by molecular weight, branching, etc.), the proportion of polyethylene glycol molecules to protein (polypeptide) molecules in the reaction mix, the type of pegylation reaction to be performed, and the method of obtaining the selected N-terminally pegylated protein. The method of obtaining the N-terminally pegylated preparation (i.e., separating this moiety from other monopegylated moieties if necessary) may be by purification of the N-terminally pegylated material from a population of pegylated protein molecules. Selective proteins chemically modified at the N-terminus modification may be accomplished by reductive alkylation which exploits differential reactivity of different types of primary amino groups (lysine versus the N-terminus) available for derivatization in a particular protein. Under the appropriate reaction conditions, substantially selective derivatization of the protein at the N-terminus with a carbonyl group containing polymer is achieved.

[0623] As with the various polymers exemplified above, it is contemplated that the polymeric residues may contain functional groups in addition, for example, to those typically involved in linking the polymeric residues to the polypeptides of the present invention. Such functionalities include, for example, carboxyl, amine, hydroxy and thiol groups. These functional groups on the polymeric residues can be further reacted, if desired, with materials that are generally reactive with such functional groups and which can assist in targeting specific tissues in the body including, for example, diseased tissue. Exemplary materials which can be reacted with the additional functional groups include, for example, proteins, including antibodies, carbohydrates, peptides, glycopeptides, glycolipids, lectins, and nucleosides.

[0624] In addition to residues of hydrophilic polymers, the chemical used to derivatize the polypeptides of the present invention can be a saccharide residue. Exemplary saccharides which can be derived include, for example, monosaccharides or sugar alcohols, such as erythrose, threose, ribose, arabinose, xylose, lyxose, fructose, sorbitol, mannitol and sedoheptulose, with preferred monosaccharides being fructose, mannose, xylose, arabinose, mannitol and sorbitol; and disaccharides, such as lactose, sucrose, maltose and cellobiose. Other saccharides include, for example, inositol and ganglioside head groups. Other suitable saccharides, in addition to those exemplified above, will be readily apparent to one skilled in the art based on the present disclosure. Generally, saccharides which may be used for derivitization include saccharides that can be attached to the polypeptides of the invention via alkylation or acylation reactions.

[0625] Moreover, the invention also encompasses derivitization of the polypeptides of the present invention, for example, with lipids (including cationic, anionic, polymerized, charged, synthetic, saturated, unsaturated, and any combination of the above, etc.). stabilizing agents.

[0626] The invention encompasses derivitization of the polypeptides of the present invention, for example, with compounds that may serve a stabilizing function (e.g., to increase the polypeptides half-life in solution, to make the polypeptides more water soluble, to increase the polypeptides hydrophilic or hydrophobic character, etc.). Polymers useful as stabilizing materials may be of natural, semi-synthetic (modified natural) or synthetic origin. Exemplary natural polymers include naturally occurring polysaccharides, such as, for example, arabinans, fructans, fucans, galactans, galacturonans, glucans, mannans, xylans (such as, for example, inulin), levan, fucoidan, carrageenan, galatocarolose, pectic acid, pectins, including amylose, pullulan, glycogen, amylopectin, cellulose, dextran, dextrin, dextrose, glucose, polyglucose, polydextrose, pustulan, chitin, agarose, keratin, chondroitin, dermatan, hyaluronic acid, alginic acid, xanthin gum, starch and various other natural homopolymer or heteropolymers, such as those containing one or more of the following aldoses, ketoses, acids or amines: erythose, threose, ribose, arabinose, xylose, lyxose, allose, altrose, glucose, dextrose, mannose, gulose, idose, galactose, talose, erythrulose, ribulose, xylulose, psicose, fructose, sorbose, tagatose, mannitol, sorbitol, lactose, sucrose, trehalose, maltose, cellobiose, glycine, serine, threonine, cysteine, tyrosine, asparagine, glutamine, aspartic acid, glutamic acid, lysine, arginine, histidine, glucuronic acid, gluconic acid, glucaric acid, galacturonic acid, mannuronic acid, glucosamine, galactosamine, and neuraminic acid, and naturally occurring derivatives thereof Accordingly, suitable polymers include, for example, proteins, such as albumin, polyalginates, and polylactide-coglycolide polymers. Exemplary semi-synthetic polymers include carboxymethylcellulose, hydroxymethylcellulose, hydroxypropylmethylcellulose, methylcellulose, and methoxycellulose. Exemplary synthetic polymers include polyphosphazenes, hydroxyapatites, fluoroapatite polymers, polyethylenes (such as, for example, polyethylene glycol (including for example, the class of compounds referred to as Pluronics.RTM., commercially available from BASF, Parsippany, N.J.), polyoxyethylene, and polyethylene terephthlate), polypropylenes (such as, for example, polypropylene glycol), polyurethanes (such as, for example, polyvinyl alcohol (PVA), polyvinyl chloride and polyvinylpyrrolidone), polyamides including nylon, polystyrene, polylactic acids, fluorinated hydrocarbon polymers, fluorinated carbon polymers (such as, for example, polytetrafluoroethylene), acrylate, methacrylate, and polymethylmethacrylate, and derivatives thereof. Methods for the preparation of derivatized polypeptides of the invention which employ polymers as stabilizing compounds will be readily apparent to one skilled in the art, in view of the present disclosure, when coupled with information known in the art, such as that described and referred to in Unger, U.S. Pat. No. 5,205,290, the disclosure of which is hereby incorporated by reference herein in its entirety.

[0627] Moreover, the invention encompasses additional modifications of the polypeptides of the present invention. Such additional modifications are known in the art, and are specifically provided, in addition to methods of derivitization, etc., in U.S. Pat. No. 6,028,066, which is hereby incorporated in its entirety herein.

[0628] The polypeptides of the invention may be in monomers or multimers (i.e., dimers, trimers, tetramers and higher multimers). Accordingly, the present invention relates to monomers and multimers of the polypeptides of the invention, their preparation, and compositions (preferably, Therapeutics) containing them. In specific embodiments, the polypeptides of the invention are monomers, dimers, trimers or tetramers. In additional embodiments, the multimers of the invention are at least dimers, at least trimers, or at least tetramers.

[0629] Multimers encompassed by the invention may be homomers or heteromers. As used herein, the term homomer, refers to a multimer containing only polypeptides corresponding to the amino acid sequence of SEQ ID NO:Y (including fragments, variants, splice variants, and fusion proteins, corresponding to these polypeptides as described herein). These homomers may contain polypeptides having identical or different amino acid sequences. In a specific embodiment, a homomer of the invention is a multimer containing only polypeptides having an identical amino acid sequence. In another specific embodiment, a homomer of the invention is a multimer containing polypeptides having different amino acid sequences. In specific embodiments, the multimer of the invention is a homodimer (e.g., containing polypeptides having identical or different amino acid sequences) or a homotrimer (e.g., containing polypeptides having identical and/or different amino acid sequences). In additional embodiments, the homomeric multimer of the invention is at least a homodimer, at least a homotrimer, or at least a homotetramer.

[0630] As used herein, the term heteromer refers to a multimer containing one or more heterologous polypeptides (i.e., polypeptides of different proteins) in addition to the polypeptides of the invention. In a specific embodiment, the multimer of the invention is a heterodimer, a heterotrimer, or a heterotetramer. In additional embodiments, the heteromeric multimer of the invention is at least a heterodimer, at least a heterotrimer, or at least a heterotetramer.

[0631] Multimers of the invention may be the result of hydrophobic, hydrophilic, ionic and/or covalent associations and/or may be indirectly linked, by for example, liposome formation. Thus, in one embodiment, multimers of the invention, such as, for example, homodimers or homotrimers, are formed when polypeptides of the invention contact one another in solution. In another embodiment, heteromultimers of the invention, such as, for example, heterotrimers or heterotetramers, are formed when polypeptides of the invention contact antibodies to the polypeptides of the invention (including antibodies to the heterologous polypeptide sequence in a fusion protein of the invention) in solution. In other embodiments, multimers of the invention are formed by covalent associations with and/or between the polypeptides of the invention. Such covalent associations may involve one or more amino acid residues contained in the polypeptide sequence (e.g., that recited in the sequence listing). In one instance, the covalent associations are cross-linking between cysteine residues located within the polypeptide sequences which interact in the native (i.e., naturally occurring) polypeptide. In another instance, the covalent associations are the consequence of chemical or recombinant manipulation. Alternatively, such covalent associations may involve one or more amino acid residues contained in the heterologous polypeptide sequence in a fusion protein of the invention.

[0632] In one example, covalent associations are between the heterologous sequence contained in a fusion protein of the invention (see, e.g., U.S. Pat. No. 5,478,925). In a specific example, the covalent associations are between the heterologous sequence contained in an Fc fusion protein of the invention (as described herein). In another specific example, covalent associations of fusion proteins of the invention are between heterologous polypeptide sequence from another protein that is capable of forming covalently associated multimers, such as for example, osteoprotegerin (see, e.g., International Publication NO: WO 98/49305, the contents of which are herein incorporated by reference in its entirety). In another embodiment, two or more polypeptides of the invention are joined through peptide linkers. Examples include those peptide linkers described in U.S. Pat. No. 5,073,627 (hereby incorporated by reference). Proteins comprising multiple polypeptides of the invention separated by peptide linkers may be produced using conventional recombinant DNA technology.

[0633] Another method for preparing multimer polypeptides of the invention involves use of polypeptides of the invention fused to a leucine zipper or isoleucine zipper polypeptide sequence. Leucine zipper and isoleucine zipper domains are polypeptides that promote multimerization of the proteins in which they are found. Leucine zippers were originally identified in several DNA-binding proteins (Landschulz et al., Science 240:1759, (1988)), and have since been found in a variety of different proteins. Among the known leucine zippers are naturally occurring peptides and derivatives thereof that dimerize or trimerize. Examples of leucine zipper domains suitable for producing soluble multimeric proteins of the invention are those described in PCT application WO 94/10308, hereby incorporated by reference. Recombinant fusion proteins comprising a polypeptide of the invention fused to a polypeptide sequence that dimerizes or trimerizes in solution are expressed in suitable host cells, and the resulting soluble multimeric fusion protein is recovered from the culture supernatant using techniques known in the art.

[0634] Trimeric polypeptides of the invention may offer the advantage of enhanced biological activity. Preferred leucine zipper moieties and isoleucine moieties are those that preferentially form trimers. One example is a leucine zipper derived from lung surfactant protein D (SPD), as described in Hoppe et al. (FEBS Letters 344:191, (1994)) and in U.S. patent application Ser. No. 08/446,922, hereby incorporated by reference. Other peptides derived from naturally occurring trimeric proteins may be employed in preparing trimeric polypeptides of the invention.

[0635] In another example, proteins of the invention are associated by interactions between Flag(® polypeptide sequence contained in fusion proteins of the invention containing Flag® polypeptide sequence. In a further embodiment, associations proteins of the invention are associated by interactions between heterologous polypeptide sequence contained in Flag® fusion proteins of the invention and anti-Flag® antibody.

[0636] The multimers of the invention may be generated using chemical techniques known in the art. For example, polypeptides desired to be contained in the multimers of the invention may be chemically cross-linked using linker molecules and linker molecule length optimization techniques known in the art (see, e.g., U.S. Pat. No. 5,478,925, which is herein incorporated by reference in its entirety). Additionally, multimers of the invention may be generated using techniques known in the art to form one or more inter-molecule cross-links between the cysteine residues located within the sequence of the polypeptides desired to be contained in the multimer (see, e.g., U.S. Pat. No. 5,478,925, which is herein incorporated by reference in its entirety). Further, polypeptides of the invention may be routinely modified by the addition of cysteine or biotin to the C terminus or N-terminus of the polypeptide and techniques known in the art may be applied to generate multimers containing one or more of these modified polypeptides (see, e.g., U.S. Pat. No. 5,478,925, which is herein incorporated by reference in its entirety). Additionally, techniques known in the art may be applied to generate liposomes containing the polypeptide components desired to be contained in the multimer of the invention (see, e.g., U.S. Pat. No. 5,478,925, which is herein incorporated by reference in its entirety).

[0637] Alternatively, multimers of the invention may be generated using genetic engineering techniques known in the art. In one embodiment, polypeptides contained in multimers of the invention are produced recombinantly using fusion protein technology described herein or otherwise known in the art (see, e.g., U.S. Pat. No. 5,478,925, which is herein incorporated by reference in its entirety). In a specific embodiment, polynucleotides coding for a homodimer of the invention are generated by ligating a polynucleotide sequence encoding a polypeptide of the invention to a sequence encoding a linker polypeptide and then further to a synthetic polynucleotide encoding the translated product of the polypeptide in the reverse orientation from the original C-terminus to the N-terminus (lacking the leader sequence) (see, e.g., U.S. Pat. No. 5,478,925, which is herein incorporated by reference in its entirety). In another embodiment, recombinant techniques described herein or otherwise known in the art are applied to generate recombinant polypeptides of the invention which contain a transmembrane domain (or hydrophobic or signal peptide) and which can be incorporated by membrane reconstitution techniques into liposomes (see, e.g., U.S. Pat. No. 5,478,925, which is herein incorporated by reference in its entirety).

[0638] In addition, the polynucleotide insert of the present invention could be operatively linked to “artificial” or chimeric promoters and transcription factors. Specifically, the artificial promoter could comprise, or alternatively consist, of any combination of cis-acting DNA sequence elements that are recognized by trans-acting transcription factors. Preferably, the cis acting DNA sequence elements and trans-acting transcription factors are operable in mammals. Further, the trans-acting transcription s actors of such “artificial” promoters could also be “artificial” or chimeric in design themselves and could act as activators or repressors to said “artificial” promoter.

[0639] Methods of Use of The Allelic Polynucleotides and Polypeptides of the Present Invention

[0640] The determination of the polymorphic form(s) present in an individual at one or more polymorphic sites defined herein can be used in a number of methods.

[0641] In preferred embodiments, the polynucleotides and polypeptides of the present invention, including allelic and variant forms thereof, have uses which include, but are not limited to diagnosing individuals to identify whether a given individual has increased susceptibility or risk for angioedema using the genotype assays of the present invention, and diagnosing individuals to identify whether a given individual, upon administration of an ACE inhibitor or vasopeptidase inhibitors, has increased susceptibility slor risk for angioedema using the genotype assays of the present invention.

[0642] In another embodiment, the polynucleotides and polypeptides of the present invention, including allelic and variant forms thereof, either alone,or in combination with other polymorphic polynucleotides (haplotypes) are useful as genetic markers.

[0643] In preferred embodiments, the polynucleotides and polypeptides of the present invention, including allelic and variant forms thereof, have uses which include, but are not limited to diagnosing individuals to identify whether a given individual has increased susceptibility or risk for other conditions such as hypertension, congestive heart failure, and inflammatory bowel disease using the genotype assays of the present invention, and diagnosing individuals to identify whether a given individual, upon administration of a ACE inhibitors, vasopeptidase inhibitors, and/or any other cardiovascular drug known in the art or described herein, has increased susceptibility or risk for an gnoedema using the genotype assays of the present invention.

[0644] In preferred embodiments, the polynucleotides and polypeptides of the present invention, including allelic and variant forms thereof, have uses which include, but are not limited to diagnosing individuals to identify whether a given individual has increased susceptibility or risk for additional conditions, which include, the following, non-limiting examples: angioedema, cardiovascular diseases, angina pectoris, hypertension, heart failure, myocardial infarction, ventricular hypertrophy, cough associated with ACE inhibitors, cough associated with vasopeptidase inhibitors, vascular diseases, miscrovascular disease, vascular leak syndrome, aneurysm, stroke, embolism, thrombosis, endothelial dysfunction, coronary artery disease, arteriosclerosis, and/or atherosclerosis.

[0645] In preferred embodiments, the polynucleotides and polypeptides of the present invention, including allelic and variant forms thereof, have uses which include, but are not limited to diagnosing individuals to identify whether a given individual has increased susceptibility or risk for additional conditions, which include, the following, non-limiting examples: hypotensive reactions during blood transfusions (Transfusion. 1999 Oct;39(10):1084-8.), hypersensitivity reactions during hemodialysis (Peptides. 1999;20(4):421-30.), sepsis, inflammatory arthritis, and enterocolitis (Clin Rev Allergy Immunol. 1998 Winter;16(4):365-84.), enterocolitis (Gut. 1998 Sep;43(3):365-74.), chronic granulomatous intestinal and systemic inflammation (FASEB J. 1998 Mar;12(3):325-33.), peptidoglycan-induced arthritis (Arthritis Rheum. 1997 Jul;40(7): 1327-33.), arthritis (Proc Assoc Am Physicians. 1997 Jan;109(1):10-22.), intestinal inflammation (Dig Dis Sci. 1996 May;41(5):912-20.), acute phase response of inflammation (Peptides. 1996;17(7):1163-70.), asthma (J Appl Physiol 1995; 78: 1844-1852), chronic obstructive pulmonary disease (COPD), cough reflex, allergies, and/or neurogenic inflammation.

[0646] The polynucleotides and polypeptides of the present invention, including allelic and/or variant forms thereof, are useful for creating recombinant vectors and hosts cells for the expression of variant forms of the polypeptides of the present invention.

[0647] The polynucleotides and polypeptides of the present invention, including allelic and/or variant forms thereof, are useful for creating antagonists directed against these polynucleotides and polypeptides, particularly antibody antagonists, for diagnostic, and/or therapeutic applications.

[0648] Additionally, the polynucleotides and polypeptides of the present invention, including allelic and/or variant forms thereof, are useful for creating additional antagonists directed against these polynucleotides and polypeptides, which include, but are not limited to the design of antisense RNA, ribozymes, PNAs, recombinant zinc finger proteins (Wolfe, S A., Ramm, E I., Pabo, C O., Structure, Fold, Des., 8(7):739-50, (2000); Kang, J S., Kim, J S, J. Biol, Chem., 275(12):8742-8, (2000); Wang, B S., Pabo, C O., Proc, Natl, Acad, Sci, U, S, A., 96(17):9568-73, (1999); McColl, D J., Honchell, C D., Frankel, A D, Proc, Natl, Acad, Sci, U, S, A., 96(17):9521-6, (1999); Segal, D J., Dreier, B., Beerli, R R., Barbas, CF-3rd, Proc, Natl, Acad, Sci, U, S, A., 96(6):2758-63, (1999); Wolfe, S A., Greisman, H A., Rarimr, E I., Pabo, C O., J. Mol, Biol., 285(5):1917-34, (1999); Pomerantz, J L., Wolfe, S A., Pabo, C O, Biochemistry., 37(4):965-70, (1998); Leon, O., Roth, M., Biol. Res. 33(1):21-30 (2000); Berg, J M., Godwin, H A, Ann. Rev. Biophys. Biomol. Struct., 26:357-71 (1997)), in addition to other types of antagonists which are either described elsewhere herein, or known in the art.

[0649] The polynucleotides and polypeptides of the present invention, including allelic and/or variant forms thereof, are useful for creating small molecule antagonists directed against the variant forms of these polynucleotides and polypeptides, preferably wherein such small molecules are useful as therapeutic and/or pharmaceutical compounds for the treatment, detection, prognosis, and/or prevention of the following, nonlimiting diseases and/or disorders, cardiovascular diseases, inflammatory diseases, angioedema, hypertension, and congestive heart failure.

[0650] The polynucleotides and polypeptides of the present invention, including allelic and/or variant forms thereof, are useful for the treatment of angioedema, hypertension, and congestive heart failure, in addition to other diseases and/or conditions referenced elsewhere herein, through the application of gene therapy based regimens.

[0651] Additional uses of the polynucleotides and polypeptides of the present invention are provided herein.

[0652] A. Forensics

[0653] Determination of which polymorphic forms occupy a set of polymorphic sites in an individual identifies a set of polymorphic forms that distinguishes the individual. See generally National Research Council, The Evaluation of Forensic DNA Evidence (Eds. Pollard et al., National Academy Press, DC, 1996). The more sites that are analyzed, the lower the probability that the set of polymorphic forms in one individual is the same as that in an unrelated individual. Preferably, if multiple sites are analyzed, the sites are unlinked. Thus, polymorphisms of the invention are often used in conjunction with polymorphisms in distal genes. Preferred polymorphisms for use in forensics are biallelic because the population frequencies of two polymorphic forms can usually be determined with greater accuracy than those of multiple polymorphic forms at multi-allelic loci.

[0654] The capacity to identify a distinguishing or unique set of forensic markers in an individual is useful for forensic analysis. For example, one can determine whether a blood sample from a suspect matches a blood or other tissue sample from a crime scene by determining whether the set of polymorphic forms occupying selected polymorphic sites is the same in the suspect and the sample. If the set of polymorphic markers does not match between a suspect and a sample, it can be concluded (barring experimental elTor) that the suspect was not the source of the sample. If the set of markers does match, one can conclude that the DNA from the suspect is consistent with that found at the crime scene. If frequencies of the polymorphic forms at the loci tested have been determined (e.g., by analysis of a suitable population of individuals), one can perform a statistical analysis to determine the probability that a match of suspect and crime scene sample would occur by chance.

[0655] p(ID) is the probability that two random individuals have the same polymorphic or allelic form at a given polymorphic site. In biallelic loci, four genotypes are possible: AA, AB, BA, and BB. If alleles A and B occur in a haploid genome of the organism with frequencies x and y, the probability of each genotype in a diploid organism is (see WO 95/12607):

[0656] Homozygote: p(AA)=x²

[0657] Homozygote: p(BB)=y²=(1-X)²

[0658] Single Heterozygote: p(AB)=p(BA)=xy=x(1-x)

[0659] Both Heterozygotes: p(AB+BA)=2xy=2x(1-x)

[0660] The probability of identity at one locus (i.e., the probability that two individuals, picked at random from a population will have identical polymorphic forms at a given locus) is given by the equation:

p(ID)=(x²)²+(2xy)²+(y²)².

[0661] These calculations can be extended for any number of polymorphic forms at a given locus. For example, the probability of identity p(m) for a 3-allele system where the alleles have the frequencies in the population of x, y and z, respectively, is equal to the sum of the squares of the genotype frequencies:

p(ID)=x⁴+(2xy)²+(2yz)²+(2xz)²+z⁴+y⁴

[0662] In a locus of n alleles, the appropriate binomial expansion is used to calculate p(ID) and p(exc).

[0663] The cumulative probability of identity (cum p(ID)) for each of multiple unlinked loci is determined by multiplying the probabilities provided by each locus.

cum p(ID)=p(ID1)p(ID2)p(ID3) . . . p(IDn)

[0664] The cumulative probability of non-identity for n loci (i.e. the probability that two random individuals will be different at lor more loci) is given by the equation:

cum p(nonlD)=1-cum p(ID).

[0665] If several polymorphic loci are tested, the cumulative probability of non-identity for random individuals becomes very high (e.g., one billion to one). Such probabilities can be taken into account together with other evidence in determining the guilt or innocence of the suspect.

[0666] B. Paternity Testing

[0667] The object of paternity testing is usually to determine whether a male is the father of a child. In most cases, the mother of the child is known and thus, the mother's contribution to the child's genotype can be traced. Paternity testing investigates whether the part of the child's genotype not attributable to the mother is consistent with that of the putative father. Paternity testing can be performed by analyzing sets of polymorphisms in the putative father and the child.

[0668] If the set of polymorphisms in the child attributable to the father does not match the set of polymorphisms of the putative father, it can be concluded, barring experimental error, that the putative father is not the real father.

[0669] If the set of polymorphisms in the child attributable to the father does match the set of polymorphisms of the putative father, a statistical calculation can be performed to determine the probability of coincidental match.

[0670] The probability of parentage exclusion (representing the probability that a random male will have a polymorphic form at a given polymorphic site that makes him incompatible as the father) is given by the equation (see WQ 95/12607):

p(exc)=xy(1−xy)

[0671] where x and y are the population frequencies of alleles A and B of a biallelic polymorphic site.

[0672] (At a triallelic site p(exc)=xy(1−xy)+yz(1−yz)+xz(1−xz)+3xyz(1-xyz))), where x, y and z and the respective population frequencies of alleles A, B and C).

[0673] The probability of non-exclusion is

p(non-exc)=1−p(exc)

[0674] The cumulative probability of non-exclusion (representing the value obtained when n loci are used) is thus:

cum p(non-exc)=p(non-exc1)p(non-exc2)p(non-exc3) . . . p(non-excn)

[0675] The cumulative probability of exclusion for n loci (representing the probability that a random male will be excluded)

cum p(exc)=1-cum p(non-exc).

[0676] If several polymorphic loci are included in the analysis, the cumulative probability of exclusion of a random male is very high. This probability can be taken into account in assessing the liability of a putative father whose polymorphic marker set matches the child's polymorphic marker set attributable to his/her father.

[0677] C. Correlation of Polymorphisms with Phenotypic Traits

[0678] The polymorphisms of the invention may contribute to the phenotype of an organism in different ways. Some polymorphisms occur within a protein coding sequence and contribute to phenotype by affecting protein structure. The effect may be neutral, beneficial or detrimental, or both beneficial and detrimental, depending on the circumstances. For example, a heterozygous sickle cell mutation confers resistance to malaria, but a homozygous sickle cell mutation is usually lethal. Other polymorphisms occur in noncoding regions but may exert phenotypic effects indirectly via influence on replication, transcription, and translation. A single polymorphism may affect more than one phenotypic trait. Likewise, a single phenotypic trait may be affected by polymorphisms in different genes. Further, some polymorphisms predispose an individual to a distinct mutation that is causally related to a certain phenotype.

[0679] Phenotypic traits include diseases that have known but hitherto unmapped genetic components (e.g., agammaglobulimenia, diabetes insipidus, Lesch-Nyhan syndrome, muscular dystrophy, Wiskott-Aldrich syndrome, Fabry's disease, familial hypercholesterolemia, polycystic kidney disease, hereditary spherocytosis, von Willebrand's disease, tuberous sclerosis, hereditary hemorrhagic telangiectasia, familial colonic polyposis, Ehlers-Danlos syndrome, osteogenesis imperfecta, and acute intermittent porphyria). Phenotypic traits also include symptoms of, or susceptibility to, multifactorial diseases of which a component is or may be genetic, such as autoimmune diseases, inflammation, cancer, diseases of the nervous system, and infection by pathogenic microorganisms. Some examples of autoimmune diseases include rheumatoid arthritis, multiple sclerosis, diabetes (insulin-dependent and non-independent), systemic lupus erythematosus and Graves disease. Some examples of cancers include cancers of the bladder, brain, breast, colon, esophagus, kidney, leukemia, liver, lung, oral cavity, ovary, pancreas, prostate, skin, stomach and uterus. Phenotypic traits also include characteristics such as longevity, appearance (e.g., baldness, obesity), strength, speed, endurance, fertility, and susceptibility or receptivity to particular drugs or therapeutic treatments.

[0680] The correlation of one or more polymorphisms with phenotypic traits can be facilitated by knowledge of the gene product of the wild type (reference) gene. The genes in which SNPs of the present invention have been identified are genes which have been previously sequenced and characterized in one of their allelic forms. Thus, the SNPs of the invention can be used to identify correlations between one or another allelic form of the gene with a disorder with which the gene is associated, thereby identifying causative or predictive allelic forms of the gene.

[0681] Correlation is performed for a population of individuals who have been tested for the presence or absence of a phenotypic trait of interest and for polymorphic markers sets. To perform such analysis, the presence or absence of a set of polymorphisms (i.e. a polymorphic set) is determined for a set of the individuals, some of whom exhibit a particular trait, and some of which exhibit lack of the trait. The alleles of each polymorphism of the set are then reviewed to determine whether the presence or absence of a particular allele is associated with the trait of interest. Correlation can be performed by standard statistical methods such as a IC-squared test and statistically significant correlations between polymorphic form(s) and phenotypic characteristics are noted. For example, it might be found that the presence of allele A1 at polymorphism A correlates with heart disease. As a further example, it might be found that the combined presence of allele Al at polymorphism A and allele B1 at polymorphism B correlates with increased milk production of a farm animal.

[0682] Such correlations can be exploited in several ways. In the case of a strong correlation between a set of one or more polymorphic forms and a disease for which treatment is available, detection of the polymorphic form set in a human or animal patient may justify immediate administration of treatment, or at least the institution of regular monitoring of the patient. Detection of a polymorphic form correlated with serious disease in a couple contemplating a family may also be valuable to the couple in their reproductive decisions. For example, the female partner might elect to undergo in vitro fertilization to avoid the possibility of transmitting such a polymorphism from her husband to her offspring. In the case of a weaker, but still statistically significant correlation between a polymorphic set and human disease, immediate therapeutic intervention or monitoring may not be justified. Nevertheless, the patient can be motivated to begin simple life-style changes (e.g., diet, exercise) that can be accomplished at little cost to the patient but confer potential benefits in reducing the risk of conditions to which the patient may have increased susceptibility by virtue of variant alleles. Identification of a polymorphic set in a patient correlated with enhanced receptiveness to one of several treatment regimes for a disease indicates that this treatment regime should be followed.

[0683] For animals and plants, correlations between characteristics and phenotype are useful for breeding for desired characteristics. For example, Beitz et al, U.S. Pat. No. 5,292,639 discuss use of bovine mitochondrial polymorphisms in a breeding program to improve milk production in cows. To evaluate the effect of mtDNA D-loop sequence polymorphism on milk production, each cow was assigned a value of 1 ifvariant or 0 if wildtype with respect to a prototypical mitochondrial DNA sequence at each of 10 locations considered. Each production trait was analyzed individually with the following animal model:

[0684] Yᵢⱼₖₚₙ=υ+YSᵢ+Pⱼ+Xₖ+β₁+. . . β₁₇+PEₙ+aₙ+eₚ

[0685] where Yᵢⱼₖₚₙ is the milk, fat, fat percentage, SNF, SNF percentage, energy concentration, or lactation energy record; υ is an overall mean; YSᵢ is the effect common to all cows calving in year-season; Xₖ is the effect common to cows in either the high or average selection line; β₁ to β₁₇ are the binomial regressions of production record on mtDNA D- loop sequence polymorphisms; PEₙ is permanent environmental effect common to all records of cow n; aₙ is effect of animal n and is composed of the additive genetic contribution of sire and dam breeding values and a Mendelian sampling effect; and ep is a random residual. It was found that eleven of seventeen polymorphisms tested influenced at least one production trait. Bovines having the best polymorphic forms for milk production at these eleven loci are used as parents for breeding the next generation of the herd.

[0686] D. Genetic Mapping of Phenotypic Traits

[0687] The previous section concerns identifying correlations between phenotypic traits and polymorphisms that directly or indirectly contribute to those traits. The present section describes identification of a physical linkage between a genetic locus associated with a trait of interest and polymorphic markers that are not associated with the trait, but are in physical proximity with the genetic locus responsible for the trait and cosegregate with it. Such analysis is useful for mapping a genetic locus associated with a phenotypic trait to a chromosomal position, and thereby cloning gene(s) responsible for the trait. See Lander et al., Proc. Natl. Acad. Sci. (USA) 83:7353-7357 (1986); Lander et al., Proc. Natl. Acad. Sci. (USA) 84:2363-2367 (1987); Donis-Keller et al., Cell 51:319-337 (1987); Lander et al., Genetics 121:185-199 (1989)). Genese localized by linkage can be cloned by a process known as directional cloning. See Winwright, Med. J. Australia 159:170-174 (1993); Collins, Nature Genetics 1:3-6 (1992).

[0688] Linkage studies are typically performed on members of a family. Available members of the family are characterized for the presence or absence of a phenotypic trait and for a set of polymorhic markers. The distribution of polymorphic markers in an informative meiosis is then analyzed to determine which polymorphic markers cosegregate with a phenotypic trait. See, e.g., Kerem et al., Science 245:1073-1080 (1989); Monaco et al., Nature 316:842 (1985); Yamoka et al., Neurology 40:222-226 (1990); Rossiter et al., FASEB Journal, 5:21-27 (1991).

[0689] Linkage is analyzed by calculation of LOD (log of the odds) values. A LOS value is the realtive likelihood of obtaining observed segregation data for a marker and a genetic locus when the two are located at a recombination fraction θ, versus the situtation in which the two are not linked, and thus segregating independetly (Thompson & Thompson, Genetics in Medicine (₅th ed, W. B. Saunders Company, Philadelphia, 1991); Strachan, “Mapping the human genome” in The Human Gneome (BIOS Scientic Publishers Ltd, Oxford), Chapter 4). A series of likelihoos ratios are calculated at various recombination fractions (θ), ranging from θ=0.0 (coincident loci) to θ=0.50 (unlinked). Thus, the likelihoos ata given value of θ is: probability of data if loci linked at θ to probability of data if loci are unlinked. The computed likelihoods are usually expressed as the log10 of this ratio (i.e., a LOD score). For example, a LOD score of 3 indicates 1000:1 odds against an apparent obsered linkage being a coincidence. The use of logarithms allos data collected from different familites to be combined by simple algorithm. Computer programs are available for the calculation of LOD scores for differing values of θ (e.g., LIPED, MLINK (Lathrop, Proc. Nat. Acad. Sci. (USA) 81, 3443-3446 (1984)). For any particular lod score, a recombination fraction- may be determined from mathematical tables. See Smith et al., lvlathematical tables for research workers in human genetics (Churchill, London, 1961); Smith, Ann. Hum. Genet. 32,127-150 (1968). The value of θ at which the lod score is the highest is considered to be the best estimate of the recombination fraction. Positive lod score values suggest that the two loci are linked, whereas negative values suggest that linkage is less likely (at that value of θ) than the possibility that the two loci are unlinked. By convention, a combined lod score of +3 or greater ( equivalent to greater than 1000: 1 odds in favor of linkage) is considered definitive evidence that two loci are linked. Similarly, by convention, a negative lod score of −2 or less is taken as definitive evidence against linkage of the two loci being compared. Negative linkage data are useful in excluding a chromosome or a segment thereof from consideration. The search focuses on the remaining non-excluded chromosomal locations.

[0690] IV. Modified Polypeptides and Gene Sequences

[0691] The invention further provides variant forms of nucleic acids and corresponding proteins. The nucleic acids comprise one of the sequences described in Table I, IV, V, or the polynucleotides encoding the polypeptides described in Table VI, in which the polymorphic position is occupied by one of the alternative bases for that position. Some nucleic acids encode full-length variant forms of proteins. Variant genes can be expressed in an expression vector in which a variant gene is operably linked to a native or other promoter. Usually, the promoter is a eukaryotic promoter for expression in a mammalian cell. The transcription regulation sequences typically include a heterologous promoter and optionally an enhancer which is recognized by the host. The selection of an appropriate promoter, for example trp, lac, phage promoters, glycolytic enzyme promoters and tRNA promoters, depends on the host selected. Commercially available expression vectors can be used. Vectors can include host-recognized replication systems, amplifiable genes, selectable markers, host sequences useful for insertion into the host genome, and the like.

[0692] The means of introducing the expression construct into a host cell varies depending upon the particular construction and the target host. Suitable means include fusion, conjugation, transfection, transduction, electroporation or injection, as described in Sambrook, supra. A wide variety of host cells can be employed for expression of the variant gene, both prokaryotic and eukaryotic. Suitable host cells include bacteria such as E. coli, yeast, filamentous fungi, insect cells, mammalian cells, typically immortalized, e.g. , mouse, CHO, human and monkey cell lines and derivatives thereof. Preferred host cells are able to process the variant gene product to produce an appropriate mature polypeptide. Processing includes glycosylation, ubiquitination, disulfide bond formation, general post-translational modification, and the like. As used herein, “gene product” includes mRNA, peptide and protein products.

[0693] The protein may be isolated by conventional means of protein biochemistry and purification to obtain a substantially pure product, i.e., 80,95 or 99% free of cell component contaminants, as described in Jacoby, Methods in Enzymology Volume 104, Academic Press, New York (1984); Scopes, Protein Purification, Principles and Practice, 2nd Edition, Springer-Verlag, New York (1987); and Deutscher (ed), Guide to Protein Purification, Methods in Enzymology, Vol. 182 (1990). If the protein is secreted, it can be isolated from the supernatant in which the host cell is grown. If not secreted, the protein can be isolated from a lysate of the host cells.

[0694] The invention further provides transgenic nonhuman animals capable of expressing an exogenous variant gene and/or having one or both alleles of an endogenous variant gene inactivated. Expression of an exogenous variant gene is usually achieved by operably linking the gene to a promoter and optionally an enhancer, and microinjecting the construct into a zygote. See Hogan et al., “Manipulating the Mouse Embryo, A Laboratory Manual,” Cold Spring Harbor Laboratory Inactivation of endogenous variant genes can be achieved by forming a trans gene in which a cloned variant gene is inactivated by insertion of a positive selection marker. See Capecchi, Science 244, 1288-1292 (1989). The trans gene is then introduced into an embryonic stem cell, where it undergoes homologous recombination with an endogenous variant gene. Mice and other rodents are preferred animals. Such animals provide useful drug screening systems.

[0695] In addition to substantially full-length polypeptides expressed by variant genes, the present invention includes biologically active fragments of the polypeptides, or analogs thereof, including organic molecules which simulate the interactions of the peptides. Biologically active fragments include any portion of the full-length polypeptide which confers a biological function on the variant gene product, including ligand binding, and antibody binding. Ligand binding includes binding by nucleic acids, proteins or polypeptides, small biologically active molecules, or large cellular structures.

[0696] Polyclonal and/or monoclonal antibodies that specifically bind to variant gene products but not to corresponding prototypical gene products are also provided. Antibodies can be made by injecting mice or other animals with the variant gene product or synthetic peptide fragments thereof. Monoclonal antibodies are screened as are described, for example, in Harlow & Lane, Antibodies, A Laboratory Manual, Cold Spring Harbor Press, New York (1988); Goding, Monoclonal antibodies, Principles and Practice (2d ed.) Academic Press, New York (1986). Monoclonal antibodies are tested for specific immunoreactivity with a variant gene product and lack of immunoreactivity to the corresponding prototypical gene product. These antibodies are useful in diagnostic assays for detection of the variant form, or as an active ingredient in a pharmaceutical composition.

[0697] V. Haplotype Based Genetic Analysis

[0698] The invention further provides methods of applying the polynucleotides and polypeptides of the present invention to the elucidation of haplotypes. Such haplotypes may be associated with any one or more of the disease conditions referenced elsewhere herein. A “haplotype” is defined as the pattern of a set of alleles of single nucleotide polymorphisms along a chromosome. For example, consider the case of three single nucleotide polymorphisms (SNP1, SNP2, and SNP3) in one chromosome region, of which SNP 1is an A/G polymorphism, SNP2 is a G/C polymorphism, and SNP3 is an A/C polymorphism. A and G are the alleles for the first, G and C for the second and A and C for the third SNP. Given two alleles for each SNP, there are three possible genotypes for individuals at each SNP. For example, for the first SNP, A/A, A/G and G/G are the possible genotypes for individuals. When an individual has a genotype for a SNP in which the alleles are not the same, for example A/G for the first SNP, then the individual is a heterozygote. When an individual has an A/G genotype at SNP1, G/C genotype at SNP2, and A/C genotype at SNP3 (FIG. 39), there are four possible combinations of haplotypes (A, B, C, and D) for this individual. The set of SNP genotypes of this individual alone would not provide sufficient information to resolve which combination of haplotypes this individual possesses. However, when this individual's parents' genotypes are available, haplotypes could then be assigned unambiguously. For example, if one parent had an A/A genotype at SNP1, a G/C genotype at SNP2, and an A/A genotype at SNP3, and the other parent had an A/G genotype at SNP1, C/C genotype at SNP2, and C/C genotype at SNP3, while the child was a heterozygote at all three SNPs (FIG. 40), there is only one possible haplotype combination, assuming there was no crossing over in this region during meiosis.

[0699] When the genotype information of relatives is not available, haplotype assignment can be done using the long range-PCR method (Clark, A. G.. Mol Biol Evol 7(2): 111-22 (1990); Clark, A. G., K. M. Weiss, et al.. Am J Hum Genet 63(2): 595-612 (1998); Fullerton, S. M., A. G. Clark, et al., Am J Hum. Genet 67(4): 881-900 (2000); Templeton, A. R., A. G. Clark, et al., Am J Hum Genet 66(1): 69-83 (2000)). When the genotyping result of the SNPs of interest are available from general population samples, the most likely haplotypes can also be assigned using statistical methods (Excoffier, L. and M. Slatkin. Mol Biol Evol 12(5): 921-7 (1995); Fallin, D. and N. J. Schork, Am J Hum Genet 67(4): 947-59 (2000); Long, J. C., R. C. Williams, et al., Am J Hum Genet 56(3): 799-810 (1995)).

[0700] Once an individual's haplotype in a certain chromosome region (i.e., locus) has been determined, it can be used as a tool for genetic association studies using different methods, which include, for example, haplotype relative risk analysis (Knapp, M., S. A. Seuchter, et al., Am J Hum Genet 52(6): 1085-93 (1993); Li, T., M. Arranz, et al., Schizophr Res 32(2): 87-92 (1998); Matise, T. C., Genet Epidemiol 12(6): 641-5 (1995); Ott, J., Genet Epidemiol 6(1): 127-30 (1989); Terwilliger, J. D. and J. Ott, Hum Hered 42(6): 337-46 (1992)). Haplotype based genetic analysis, using a combination of SNPs, provides increased detection sensitivity, and hence statistical significance, for genetic associations of diseases, as compared to analyses using individual SNPs as markers. Multiple SNPs present in a single gene or a continuous chromosomal region are useful for such haplotype-based analyses.

[0701] VI. Kits

[0702] The invention further provides kits comprising at least one agent for identifying which alleleic form of the SNPs identified herein is present in a sample. For example, suitable kits can comprise at least one antibody specific for a particular protein or peptide encoded by one alleleic form of the gene, or allele-specific oligonucleotide as described herein. Often, the kits contain one or more pairs of allele-specific oligonucleotides hybridizing to different forms of a polymorphism. In some kits, the allele-specific oligonucleotides are provided immobilized to a substrate. For example, the same substrate can comprise allele-specific oligonucleotide probes for detecting at least 1, 10, 100 or all of the polymorphisms shown in Tables I, IV, V, or VI. Optional additional components of the kit include, for example, restriction enzymes, reverse-transcriptase or polymerase, the substrate nucleoside triphosphates, means used to label (for example, an avidin-enzyme conjugate and enzyme substrate and chromogen if the label is biotin), and the appropriate buffers for reverse transcription, PCR, or hybridization reactions. Usually, the kit also contains instructions for carrying out the methods.

[0703] Uses of the Polynucleotides

[0704] Each of the polynucleotides identified herein can be used in numerous ways as reagents. The following description should be considered exemplary and utilizes known techniques.

[0705] The polynucleotides of the present invention are useful for chromosome identification. There exists an ongoing need to identify new chromosome markers, since few chromosome marking reagents, based on actual sequence data (repeat polymorphisms), are presently available. Each polynucleotide of the present invention can be used as a chromosome marker.

[0706] Briefly, sequences can be mapped to chromosomes by preparing PCR primers (preferably 15-25 bp) from the sequences shown in SEQ ID NO:X. Primers can be selected using computer analysis so that primers do not span more than one predicted exon in the genomic DNA. These primers are then used for PCR screening of somatic cell hybrids containing individual human chromosomes. Only those hybrids containing the human gene corresponding to the SEQ ID NO:X will yield an amplified fragment.

[0707] Similarly, somatic hybrids provide a rapid method of PCR mapping the polynucleotides to particular chromosomes. Three or more clones can be assigned per day using a single thermal cycler. Moreover, sublocalization of the polynucleotides can be achieved with panels of specific chromosome fragments. Other gene mapping strategies that can be used include in situ hybridization, prescreening with labeled flow-sorted chromosomes, and preselection by hybridization to construct chromosome specific-cDNA libraries.

[0708] Precise chromosomal location of the polynucleotides can also be achieved using fluorescence in situ hybridization (FISH) of a metaphase chromosomal spread. This technique uses polynucleotides as short as 500 or 600 bases; however, polynucleotides 2,000-4,000 bp are preferred. For a review of this technique, see Verma et al., “Human Chromosomes: a Manual of Basic Techniques,” Pergamon Press, New York (1988).

[0709] For chromosome mapping, the polynucleotides can be used individually (to mark a single chromosome or a single site on that chromosome) or in panels (for marking multiple sites and/or multiple chromosomes). Preferred polynucleotides correspond to the noncoding regions of the cDNAs because the coding sequences are more likely conserved within gene families, thus increasing the chance of cross hybridization during chromosomal mapping.

[0710] Once a polynucleotide has been mapped to a precise chromosomal location, the physical position of the polynucleotide can be used in linkage analysis. Linkage analysis establishes coinheritance between a chromosomal location and presentation of a particular disease. Disease mapping data are known in the art. Assuming 1 megabase mapping resolution and one gene per 20 kb, a cDNA precisely localized to a chromosomal region associated with the disease could be one of 50-500 potential causative genes.

[0711] Thus, once coinheritance is established, differences in the polynucleotide and the corresponding gene between affected and unaffected organisms can be examined. First, visible structural alterations in the chromosomes, such as deletions or translocations, are examined in chromosome spreads or by PCR. If no structural alterations exist, the presence of point mutations are ascertained. Mutations observed in some or all affected organisms, but not in normal organisms, indicates that the mutation may cause the disease. However, complete sequencing of the polypeptide and the corresponding gene from several normal organisms is required to distinguish the mutation from a polymorphism. If a new polymorphism is identified, this polymorphic polypeptide can be used for further linkage analysis.

[0712] Furthermore, increased or decreased expression of the gene in affected organisms as compared to unaffected organisms can be assessed using polynucleotides of the present invention. Any of these alterations (altered expression, chromosomal rearrangement, or mutation) can be used as a diagnostic or prognostic marker.

[0713] Thus, the invention also provides a diagnostic method useful during diagnosis of a disorder, involving measuring the expression level of polynucleotides of the present invention in cells or body fluid from an organism and comparing the measured gene expression level with a standard level of polynucleotide expression level, whereby an increase or decrease in the gene expression level compared to the standard is indicative of a disorder.

[0714] By “measuring the expression level of a polynucleotide of the present invention” is intended qualitatively or quantitatively measuring or estimating the level of the polypeptide of the present invention or the level of the mRNA encoding the polypeptide in a first biological sample either directly (e.g., by determining or estimating absolute protein level or mRNA level) or relatively (e.g., by comparing to the polypeptide level or mRNA level in a second biological sample). Preferably, the polypeptide level or mRNA level in the first biological sample is measured or estimated and compared to a standard polypeptide level or mRNA level, the standard being taken from a second biological sample obtained from an individual not having the disorder or being determined by averaging levels from a population of organisms not having a disorder. As will be appreciated in the art, once a standard polypeptide level or mRNA level is known, it can be used repeatedly as a standard for comparison.

[0715] By “biological sample” is intended any biological sample obtained from an organism, body fluids, cell line, tissue culture, or other source which contains the polypeptide of the present invention or mRNA. As indicated, biological samples include body fluids (such as the following non-limiting examples, sputum, amniotic fluid, urine, saliva, breast milk, secretions, interstitial fluid, blood, serum, spinal fluid, etc.) which contain the polypeptide of the present invention, and other tissue sources found to express the polypeptide of the present invention. Methods for obtaining tissue biopsies and body fluids from organisms are well known in the art. Where the biological sample is to include mRNA, a tissue biopsy is the preferred source.

[0716] The method(s) provided above may Preferably be applied in a diagnostic method and/or kits in which polynucleotides and/or polypeptides are attached to a solid support. In one exemplary method, the support may be a “gene chip” or a “biological chip” as described in U.S. Pat. Nos. 5,837,832, 5,874,219, and 5,856,174. Further, such a gene chip with polynucleotides of the present invention attached may be used to identify polymorphisms between the polynucleotide sequences, with polynucleotides isolated from a test subject. The knowledge of such polymorphisms (i.e. their location, as well as, their existence) would be beneficial in identifying disease loci for many disorders, including proliferative diseases and conditions. Such a method is described in U.S. Pat. Nos. 5,858,659 and 5,856,104. The U.S. Pat. Nos. referenced supra are hereby incorporated by reference in their entirety herein.

[0717] The present invention encompasses polynucleotides of the present invention that are chemically synthesized, or reproduced as peptide nucleic acids (PNA), or according to other methods known in the art. The use of PNAs would serve as the preferred form if the polynucleotides are incorporated onto a solid support, or gene chip. For the purposes of the present invention, a peptide nucleic acid (PNA) is a polyamide type of DNA analog and the monomeric units for adenine, guanine, thymine and cytosine are available commercially (Perceptive Biosystems). Certain components of DNA, such as phosphorus, phosphorus oxides, or deoxyribose derivatives, are not present in PNAs. As disclosed by P. E. Nielsen, M. Egholm, R. H. Berg and O. Buchardt, Science 254, 1497 (1991); and M. Egholm, O. Buchardt, L.Christensen, C. Behrens, S. M. Freier, D. A. Driver, R. H. Berg, S. K. Kim, B. Norden, and P. E. Nielsen, Nature 365, 666 (1993), PNAs bind specifically and tightly to complementary DNA strands and are not degraded by nucleases. In fact, PNA binds more strongly to DNA than DNA itself does. This is probably because there is no electrostatic repulsion between the two strands, and also the polyamide backbone is more flexible. Because of this, PNA/DNA duplexes bind under a wider range of stringency conditions than DNA/DNA duplexes, making it easier to perform multiplex hybridization. Smaller probes can be used than with DNA due to the stronger binding characteristics of PNA:DNA hybrids. In addition, it is more likely that single base mismatches can be determined with PNA/DNA hybridization because a single mismatch in a PNA/DNA 15-mer lowers the melting point (T.sub.m) by 8-20° C., vs. 4°-16° C. for the DNA/DNA 15-mer duplex. Also, the absence of charge groups in PNA means that hybridization can be done at low ionic strengths and reduce possible interference by salt during the analysis.

[0718] In addition to the foregoing, a polynucleotide can be used to control gene expression through triple helix formation or antisense DNA or RNA. Antisense techniques are discussed, for example, in Okano, J. Neurochem. 56: 560 (1991); “Oligodeoxynucleotides as Antisense Inhibitors of Gene Expression, CRC Press, Boca Raton, Fla. (1988). Triple helix formation is discussed in, for instance Lee et al., Nucleic Acids Research 6: 3073 (1979); Cooney et al., Science 241: 456 (1988); and Dervan et al., Science 251: 1360 (1991). Both methods rely on binding of the polynucleotide to a complementary DNA or RNA. For these techniques, preferred polynucleotides are usually oligonucleotides 20 to 40 bases in length and complementary to either the region of the gene involved in transcription (triple helix—see Lee et al., Nucl. Acids Res. 6:3073 (1979); Cooney et al., Science 241:456 (1988); and Dervan et al., Science 251:1360 (1991) ) or to the mRNA itself (antisense—Okano, J. Neurochem. 56:560 (1991); Oligodeoxy-nucleotides as Antisense Inhibitors of Gene Expression, CRC Press, Boca Raton, Fla. (1988).) Triple helix formation optimally results in a shut-off of RNA transcription from DNA, while antisense RNA hybridization blocks translation of an mRNA molecule into polypeptide. Both techniques are effective in model systems, and the information disclosed herein can be used to design antisense or triple helix polynucleotides in an effort to treat or prevent disease.

[0719] The present invention encompasses the addition of a nuclear localization signal, operably linked to the 5′ end, 3′ end, or any location therein, to any of the oligonucleotides, antisense oligonucleotides, triple helix oligonucleotides, ribozymes, PNA oligonucleotides, and/or polynucleotides, of the present invention. See, for example, G. Cutrona, et al., Nat. Biotech., 18:300-303, (2000); which is hereby incorporated herein by reference.

[0720] Polynucleotides of the present invention are also useful in gene therapy. One goal of gene therapy is to insert a normal gene into an organism having a defective gene, in an effort to correct the genetic defect. The polynucleotides disclosed in the present invention offer a means of targeting such genetic defects in a highly accurate manner. Another goal is to insert a new gene that was not present in the host genome, thereby producing a new trait in the host cell. In one example, polynucleotide sequences of the present invention may be used to construct chimeric RNA/DNA oligonucleotides corresponding to said sequences, specifically designed to induce host cell mismatch repair mechanisms in an organism upon systemic injection, for example (Bartlett, R. J., et al., Nat. Biotech, 18:615-622 (2000), which is hereby incorporated by reference herein in its entirety). Such RNA/DNA oligonucleotides could be designed to correct genetic defects in certain host strains, and/or to introduce desired phenotypes in the host (e.g., introduction of a specific polymorphism within an endogenous gene corresponding to a polynucleotide of the present invention that may ameliorate and/or prevent a disease symptom and/or disorder, etc.). Alternatively, the polynucleotide sequence of the present invention may be used to construct duplex oligonucleotides corresponding to said sequence, specifically designed to correct genetic defects in certain host strains, and/or to introduce desired phenotypes into the host (e.g., introduction of a specific polymorphism within an endogenous gene corresponding to a polynucleotide of the present invention that may ameliorate and/or prevent a disease symptom and/or disorder, etc). Such methods of using duplex oligonucleotides are known in the art and are encompassed by the present invention (see EP1007712, which is hereby incorporated by reference herein in its entirety).

[0721] The polynucleotides are also useful for identifying organisms from minute biological samples. The United States military, for example, is considering the use of restriction fragment length polymorphism (RFLP) for identification of its personnel. In this technique, an individual's genomic DNA is digested with one or more restriction enzymes, and probed on a Southern blot to yield unique bands for identifying personnel. This method does not suffer from the current limitations of “Dog Tags” which can be lost, switched, or stolen, making positive identification difficult. The polynucleotides of the present invention can be used as additional DNA markers for RFLP.

[0722] The polynucleotides of the present invention can also be used as an alternative to RFLP, by determining the actual base-by-base DNA sequence of selected portions of an organisms genome. These sequences can be used to prepare PCR primers for amplifying and isolating such selected DNA, which can then be sequenced. Using this technique, organisms can be identified because each organism will have a unique set of DNA sequences. Once an unique ID database is established for an organism, positive identification of that organism, living or dead, can be made from extremely small tissue samples. Similarly, polynucleotides of the present invention can be used as polymorphic markers, in addition to, the identification of transformed or non-transformed cells and/or tissues.

[0723] There is also a need for reagents capable of identifying the source of a particular tissue. Such need arises, for example, when presented with tissue of unknown origin. Appropriate reagents can comprise, for example, DNA probes or primers specific to particular tissue prepared from the sequences of the present invention. Panels of such reagents can identify tissue by species and/or by organ type. In a similar fashion, these reagents can be used to screen tissue cultures for contamination. Moreover, as mentioned above, such reagents can be used to screen and/or identify transformed and non-transformed cells and/or tissues.

[0724] In the very least, the polynucleotides of the present invention can be used as molecular weight markers on Southern gels, as diagnostic probes for the presence of a specific mRNA in a particular cell type, as a probe to “subtract-out” known sequences in the process of discovering novel polynucleotides, for selecting and making oligomers for attachment to a “gene chip” or other support, to raise anti-DNA antibodies using DNA immunization techniques, and as an antigen to elicit an immune response.

[0725] Uses of the Polypeptides

[0726] Each of the polypeptides identified herein can be used in numerous ways. The following description should be considered exemplary and utilizes known techniques.

[0727] A polypeptide of the present invention can be used to assay protein levels in a biological sample using antibody-based techniques. For example, protein expression in tissues can be studied with classical immunohistological methods. (Jalkanen, M., et al., J. Cell. Biol. 101:976-985 (1985); Jalkanen, M., et al., J. Cell . Biol. 105:3087-3096 (1987).) Other antibody-based methods useful for detecting protein gene expression include immunoassays, such as the enzyme linked immunosorbent assay (ELISA) and the radioimmunoassay (RIA). Suitable antibody assay labels are known in the art and include enzyme labels, such as, glucose oxidase, and radioisotopes, such as iodine (125I, 121I), carbon (14C), sulfur (35S), tritium (3H), indium (112In), and technetium (99mTc), and fluorescent labels, such as fluorescein and rhodamine, and biotin.

[0728] In addition to assaying protein levels in a biological sample, proteins can also be detected in vivo by imaging. Antibody labels or markers for in vivo imaging of protein include those detectable by X-radiography, NMR or ESR. For X-radiography, suitable labels include radioisotopes such as barium or cesium, which emit detectable radiation but are not overtly harmful to the subject. Suitable markers for NMR and ESR include those with a detectable characteristic spin, such as deuterium, which may be incorporated into the antibody by labeling of nutrients for the relevant hybridoma.

[0729] A protein-specific antibody or antibody fragment which has been labeled with an appropriate detectable imaging moiety, such as a radioisotope (for example, 131I, 112In, 99mTc), a radio-opaque substance, or a material detectable by nuclear magnetic resonance, is introduced (for example, parenterally, subcutaneously, or intraperitoneally) into the mammal. It will be understood in the art that the size of the subject and the imaging system used will determine the quantity of imaging moiety needed to produce diagnostic images. In the case of a radioisotope moiety, for a human subject, the quantity of radioactivity injected will normally range from about 5 to 20 millicuries of 99mTc. The labeled antibody or antibody fragment will then preferentially accumulate at the location of cells which contain the specific protein. In vivo tumor imaging is described in S. W. Burchiel et al., “Immunopharmacokinetics of Radiolabeled Antibodies and Their Fragments.” (Chapter 13 in Tumor Imaging: The Radiochemical Detection of Cancer, S. W. Burchiel and B. A. Rhodes, eds., Masson Publishing Inc. (1982).)

[0730] Thus, the invention provides a diagnostic method of a disorder, which involves (a) assaying the expression of a polypeptide of the present invention in cells or body fluid of an individual; (b) comparing the level of gene expression with a standard gene expression level, whereby an increase or decrease in the assayed polypeptide gene expression level compared to the standard expression level is indicative of a disorder. With respect to cancer, the presence of a relatively high amount of transcript in biopsied tissue from an individual may indicate a predisposition for the development of the disease, or may provide a means for detecting the disease prior to the appearance of actual clinical symptoms. A more definitive diagnosis of this type may allow health professionals to employ preventative measures or aggressive treatment earlier thereby preventing the development or further progression of the cancer.

[0731] Moreover, polypeptides of the present invention can be used to treat, prevent, and/or diagnose disease. For example, patients can be administered a polypeptide of the present invention in an effort to replace absent or decreased levels of the polypeptide (e.g., insulin), to supplement absent or decreased levels of a different polypeptide (e.g., hemoglobin S for hemoglobin B, SOD, catalase, DNA repair proteins), to inhibit the activity of a polypeptide (e.g., an oncogene or tumor suppressor), to activate the activity of a polypeptide (e.g., by binding to a receptor), to reduce the activity of a membrane bound receptor by competing with it for free ligand (e.g., soluble TNF receptors used in reducing inflammation), or to bring about a desired response (e.g., blood vessel growth inhibition, enhancement of the immune response to proliferative cells or tissues).

[0732] Similarly, antibodies directed to a polypeptide of the present invention can also be used to treat, prevent, and/or diagnose disease. For example, administration of an antibody directed to a polypeptide of the present invention can bind and reduce overproduction of the polypeptide. Similarly, administration of an antibody can activate the polypeptide, such as by binding to a polypeptide bound to a membrane (receptor).

[0733] At the very least, the polypeptides of the present invention can be used as molecular weight markers on SDS-PAGE gels or on molecular sieve gel filtration columns using methods well known to those of skill in the art. Polypeptides can also be used to raise antibodies, which in turn are used to measure protein expression from a recombinant cell, as a way of assessing transformation of the host cell. Moreover, the polypeptides of the present invention can be used to test the following biological activities.

[0734] Gene Therapy Methods

[0735] Another aspect of the present invention is to gene therapy methods for treating or preventing disorders, diseases and conditions. The gene therapy methods relate to the introduction of nucleic acid (DNA, RNA and antisense DNA or RNA) sequences into an animal to achieve expression of a polypeptide of the present invention. This method requires a polynucleotide which codes for a polypeptide of the invention that operatively linked to a promoter and any other genetic elements necessary for the expression of the polypeptide by the target tissue. Such gene therapy and delivery techniques are known in the art, see, for example, WO90/11092, which is herein incorporated by reference.

[0736] Thus, for example, cells from a patient may be engineered with a polynucleotide (DNA or RNA) comprising a promoter operably linked to a polynucleotide of the invention ex vivo, with the engineered cells then being provided to a patient to be treated with the polypeptide. Such methods are well-known in the art. For example, see Belldegrun et al., J. Natl. Cancer Inst., 85:207-216 (1993); Ferrantini et al., Cancer Research, 53:107-1112 (1993); Ferrantini et al., J. Immunology 153: 4604-4615 (1994); Kaido, T., et al., Int. J. Cancer 60: 221-229 (1995); Ogura et al., Cancer Research 50: 5102-5106 (1990); Santodonato, et al., Human Gene Therapy 7:1-10 (1996); Santodonato, et al., Gene Therapy 4:1246-1255 (1997); and Zhang, et al., Cancer Gene Therapy 3: 31-38 (1996)), which are herein incorporated by reference. In one embodiment, the cells which are engineered are arterial cells. The arterial cells may be reintroduced into the patient through direct injection to the artery, the tissues surrounding the artery, or through catheter injection.

[0737] As discussed in more detail below, the polynucleotide constructs can be delivered by any method that delivers injectable materials to the cells of an animal, such as, injection into the interstitial space of tissues (heart, muscle, skin, lung, liver, and the like). The polynucleotide constructs may be delivered in a pharmaceutically acceptable liquid or aqueous carrier.

[0738] In one embodiment, the polynucleotide of the invention is delivered as a naked polynucleotide. The term “naked” polynucleotide, DNA or RNA refers to sequences that are free from any delivery vehicle that acts to assist, promote or facilitate entry into the cell, including viral sequences, viral particles, liposome formulations, lipofectin or precipitating agents and the like. However, the polynucleotides of the invention can also be delivered in liposome formulations and lipofectin formulations and the like can be prepared by methods well known to those skilled in the art. Such methods are described, for example, in U.S. Pat. Nos. 5,593,972, 5,589,466, and 5,580,859, which are herein incorporated by reference.

[0739] The polynucleotide vector constructs of the invention used in the gene therapy method are preferably constructs that will not integrate into the host genome nor will they contain sequences that allow for replication. Appropriate vectors include pWLNE0, pSV2CAT, pOG44, pXT1 and pSG available from Stratagene; pSVK3, pBPV, pMSG and pSVL available from Pharmacia; and pEF1/V5, pcDNA3.1, and pRc/CMV2 available from Invitrogen. Other suitable vectors will be readily apparent to the skilled artisan.

[0740] Any strong promoter known to those skilled in the art can be used for driving the expression of polynucleotide sequence of the invention. Suitable promoters include adenoviral promoters, such as the adenoviral major late promoter; or heterologous promoters, such as the cytomegalovirus (CMV) promoter; the respiratory syncytial virus (RSV) promoter; inducible promoters, such as the MMT promoter, the metallothionein promoter; heat shock promoters; the albumin promoter; the ApoAI promoter; human globin promoters; viral thymidine kinase promoters, such as the Herpes Simplex thymidine kinase promoter; retroviral LTRs; the b-actin promoter; and human growth hormone promoters. The promoter also may be the native promoter for the polynucleotides of the invention.

[0741] Unlike other gene therapy techniques, one major advantage of introducing naked nucleic acid sequences into target cells is the transitory nature of the polynucleotide synthesis in the cells. Studies have shown that non-replicating DNA sequences can be introduced into cells to provide production of the desired polypeptide for periods of up to six months.

[0742] The polynucleotide construct of the invention can be delivered to the interstitial space of tissues within the an animal, including of muscle, skin, brain, lung, liver, spleen, bone marrow, thymus, heart, lymph, blood, bone, cartilage, pancreas, kidney, gall bladder, stomach, intestine, testis, ovary, uterus, rectum, nervous system, eye, gland, and connective tissue. Interstitial space of the tissues comprises the intercellular, fluid, mucopolysaccharide matrix among the reticular fibers of organ tissues, elastic fibers in the walls of vessels or chambers, collagen fibers of fibrous tissues, or that same matrix within connective tissue ensheathing muscle cells or in the lacunae of bone. It is similarly the space occupied by the plasma of the circulation and the lymph fluid of the lymphatic channels. Delivery to the interstitial space of muscle tissue is preferred for the reasons discussed below. They may be conveniently delivered by injection into the tissues comprising these cells. They are preferably delivered to and expressed in persistent, non-dividing cells which are differentiated, although delivery and expression may be achieved in non-differentiated or less completely differentiated cells, such as, for example, stem cells of blood or skin fibroblasts. In vivo muscle cells are particularly competent in their ability to take up and express polynucleotides.

[0743] For the naked nucleic acid sequence injection, an effective dosage amount of DNA or RNA will be in the range of from about 0.05 mg/kg body weight to about 50 mg/kg body weight. Preferably the dosage will be from about 0.005 mg/kg to about 20 mg/kg and more preferably from about 0.05 mg/kg to about 5 mg/kg. Of course, as the artisan of ordinary skill will appreciate, this dosage will vary according to the tissue site of injection. The appropriate and effective dosage of nucleic acid sequence can readily be determined by those of ordinary skill in the art and may depend on the condition being treated and the route of administration.

[0744] The preferred route of administration is by the parenteral route of injection into the interstitial space of tissues. However, other parenteral routes may also be used, such as, inhalation of an aerosol formulation particularly for delivery to lungs or bronchial tissues, throat or mucous membranes of the nose. In addition, naked DNA constructs can be delivered to arteries during angioplasty by the catheter used in the procedure.

[0745] The naked polynucleotides are delivered by any method known in the art, including, but not limited to, direct needle injection at the delivery site, intravenous injection, topical administration, catheter infusion, and so-called “gene guns”. These delivery methods are known in the art.

[0746] The constructs may also be delivered with delivery vehicles such as viral sequences, viral particles, liposome formulations, lipofectin, precipitating agents, etc. Such methods of delivery are known in the art.

[0747] In certain embodiments, the polynucleotide constructs of the invention are complexed in a liposome preparation. Liposomal preparations for use in the instant invention include cationic (positively charged), anionic (negatively charged) and neutral preparations. However, cationic liposomes are particularly preferred because a tight charge complex can be formed between the cationic liposome and the polyanionic nucleic acid. Cationic liposomes have been shown to mediate intracellular delivery of plasmid DNA (Felgner et al., Proc. Natl. Acad. Sci. USA, 84:7413-7416 (1987), which is herein incorporated by reference); mRNA (Malone et al., Proc. Natl. Acad. Sci. USA , 86:6077-6081 (1989), which is herein incorporated by reference); and purified transcription factors (Debs et al., J. Biol. Chem.., 265:10189-10192 (1990), which is herein incorporated by reference), in functional form.

[0748] Cationic liposomes are readily available. For example, N[1-2,3-dioleyloxy)propyl]-N, N, N-triethylammonium (DOTMA) liposomes are particularly useful and are available under the trademark Lipofectin, from GIBCO BRL, Grand Island, N.Y. (See, also, Felgner et al., Proc. Natl. Acad. Sci. USA , 84:7413-7416 (1987), which is herein incorporated by reference). Other commercially available liposomes include transfectace (DDAB/DOPE) and DOTAP/DOPE (Boehringer).

[0749] Other cationic liposomes can be prepared from readily available materials using techniques well known in the art. See, e.g. PCT Publication NO: WO 90/11092 (which is herein incorporated by reference) for a description of the synthesis of DOTAP (1,2-bis(oleoyloxy)-3-(trimethylammonio)propane) liposomes. Preparation of DOTMA liposomes is explained in the literature, see, e.g., Felgner et al., Proc. Natl. Acad. Sci. USA, 84:7413-7417, which is herein incorporated by reference. Similar methods can be used to prepare liposomes from other cationic lipid materials.

[0750] Similarly, anionic and neutral liposomes are readily available, such as from Avanti Polar Lipids (Birmingham, Ala.), or can be easily prepared using readily available materials. Such materials include phosphatidyl, choline, cholesterol, phosphatidyl ethanolamine, dioleoylphosphatidyl choline (DOPC), dioleoylphosphatidyl glycerol (DOPG), dioleoylphoshatidyl ethanolamine (DOPE), among others. These materials can also be mixed with the DOTMA and DOTAP starting materials in appropriate ratios. Methods for making liposomes using these materials are well known in the art.

[0751] For example, commercially dioleoylphosphatidyl choline (DOPC), dioleoylphosphatidyl glycerol (DOPG), and dioleoylphosphatidyl ethanolamine (DOPE) can be used in various combinations to make conventional liposomes, with or without the addition of cholesterol. Thus, for example, DOPG/DOPC vesicles can be prepared by drying 50 mg each of DOPG and DOPC under a stream of nitrogen gas into a sonication vial. The sample is placed under a vacuum pump overnight and is hydrated the following day with deionized water. The sample is then sonicated for 2 hours in a capped vial, using a Heat Systems model 350 sonicator equipped with an inverted cup (bath type) probe at the maximum setting while the bath is circulated at 15EC. Alternatively, negatively charged vesicles can be prepared without sonication to produce multilamellar vesicles or by extrusion through nucleopore membranes to produce unilamellar vesicles of discrete size. Other methods are known and available to those of skill in the art.

[0752] The liposomes can comprise multilamellar vesicles (MLVs), small unilamellar vesicles (SUVs), or large unilamellar vesicles (LUVs), with SUVs being preferred. The various liposome-nucleic acid complexes are prepared using methods well known in the art. See, e.g., Straubinger et al., Methods of Immunology, 101:512-527 (1983), which is herein incorporated by reference. For example, MLVs containing nucleic acid can be prepared by depositing a thin film of phospholipid on the walls of a glass tube and subsequently hydrating with a solution of the material to be encapsulated. SUVs are prepared by extended sonication of MLVs to produce a homogeneous population of unilamellar liposomes. The material to be entrapped is added to a suspension of preformed MLVs and then sonicated. When using liposomes containing cationic lipids, the dried lipid film is resuspended in an appropriate solution such as sterile water or an isotonic buffer solution such as 10 mM Tris/NaCl, sonicated, and then the preformed liposomes are mixed directly with the DNA. The liposome and DNA form a very stable complex due to binding of the positively charged liposomes to the cationic DNA. SUVs find use with small nucleic acid fragments. LUVs are prepared by a number of methods, well known in the art. Commonly used methods include Ca2+-EDTA chelation (Papahadjopoulos et al., Biochim. Biophys. Acta, 394:483 (1975); Wilson et al., Cell, 17:77 (1979)); ether injection (Deamer et al., Biochim. Biophys. Acta, 443:629 (1976); Ostro et al., Biochem. Biophys. Res. Commun., 76:836 (1977); Fraley et al., Proc. Natl. Acad. Sci. USA, 76:3348 (1979)); detergent dialysis (Enoch et al., Proc. Natl. Acad. Sci. USA, 76:145 (1979)); and reverse-phase evaporation (REV) (Fraley et al., J. Biol. Chem.., 255:10431 (1980); Szoka et al., Proc. Natl. Acad. Sci. USA, 75:145 (1978); Schaefer-Ridder et al., Science, 215:166 (1982)), which are herein incorporated by reference.

[0753] Generally, the ratio of DNA to liposomes will be from about 10:1 to about 1:10. Preferably, the ration will be from about 5:1 to about 1:5. More preferably, the ration will be about 3:1 to about 1:3. Still more preferably, the ratio will be about 1:1.

[0754] U.S. Pat. No.: 5,676,954 (which is herein incorporated by reference) reports on the injection of genetic material, complexed with cationic liposomes carriers, into mice. U.S. Pat. Nos. 4,897,355, 4,946,787, 5,049,386, 5,459,127, 5,589,466, 5,693,622, 5,580,859, 5,703,055, and international publication NO: WO 94/9469 (which are herein incorporated by reference) provide cationic lipids for use in transfecting DNA into cells and mammals. U.S. Pat. Nos. 5,589,466, 5,693,622, 5,580,859, 5,703,055, and international publication No.: WO 94/9469 (which are herein incorporated by reference) provide methods for delivering DNA-cationic lipid complexes to mammals.

[0755] In certain embodiments, cells are engineered, ex vivo or in vivo, using a retroviral particle containing RNA which comprises a sequence encoding polypeptides of the invention. Retroviruses from which the retroviral plasmid vectors may be derived include, but are not limited to, Moloney Murine Leukemia Virus, spleen necrosis virus, Rous sarcoma Virus, Harvey Sarcoma Virus, avian leukosis virus, gibbon ape leukemia virus, human immunodeficiency virus, Myeloproliferative Sarcoma Virus, and mammary tumor virus.

[0756] The retroviral plasmid vector is employed to transduce packaging cell lines to form producer cell lines. Examples of packaging cells which may be transfected include, but are not limited to, the PE501, PA317, R-2, R-AM, PA12, T19-14X, VT-19-17-H2, RCRE, RCRIP, GP+E-86, GP+envAm12, and DAN cell lines as described in Miller, Human Gene Therapy , 1:5-14 (1990), which is incorporated herein by reference in its entirety. The vector may transduce the packaging cells through any means known in the art. Such means include, but are not limited to, electroporation, the use of liposomes, and CaPO4 precipitation. In one alternative, the retroviral plasmid vector may be encapsulated into a liposome, or coupled to a lipid, and then administered to a host.

[0757] The producer cell line generates infectious retroviral vector particles which include polynucleotide encoding polypeptides of the invention. Such retroviral vector particles then may be employed, to transduce eukaryotic cells, either in vitro or in vivo. The transduced eukaryotic cells will express polypeptides of the invention.

[0758] In certain other embodiments, cells are engineered, ex vivo or in vivo, with polynucleotides of the invention contained in an adenovirus vector. Adenovirus can be manipulated such that it encodes and expresses polypeptides of the invention, and at the same time is inactivated in terms of its ability to replicate in a normal lytic viral life cycle. Adenovirus expression is achieved without integration of the viral DNA into the host cell chromosome, thereby alleviating concerns about insertional mutagenesis. Furthermore, adenoviruses have been used as live enteric vaccines for many years with an excellent safety profile (Schwartzet al., Am. Rev. Respir. Dis., 109:233-238 (1974)). Finally, adenovirus mediated gene transfer has been demonstrated in a number of instances including transfer of alpha-1-antitrypsin and CFTR to the lungs of cotton rats (Rosenfeld et al., Science, 252:431-434 (1991); Rosenfeld et al., Cell, 68:143-155 (1992)). Furthermore, extensive studies to attempt to establish adenovirus as a causative agent in human cancer were uniformly negative (Green et al. Proc. Natl. Acad. Sci. USA, 76:6606 (1979)).

[0759] Suitable adenoviral vectors useful in the present invention are described, for example, in Kozarsky and Wilson, Curr. Opin. Genet. Devel., 3:499-503 (1993); Rosenfeld et al., Cell , 68:143-155 (1992); Engelhardt et al., Human Genet. Ther., 4:759-769 (1993); Yang et al., Nature Genet., 7:362-369 (1994); Wilson et al., Nature, 365:691-692 (1993); and U.S. Pat. No.: 5,652,224, which are herein incorporated by reference. For example, the adenovirus vector Ad2 is useful and can be grown in human 293 cells. These cells contain the E1 region of adenovirus and constitutively express E1a and E1b, which complement the defective adenoviruses by providing the products of the genes deleted from the vector. In addition to Ad2, other varieties of adenovirus (e.g., Ad3, Ad5, and Ad7) are also useful in the present invention.

[0760] Preferably, the adenoviruses used in the present invention are replication deficient. Replication deficient adenoviruses require the aid of a helper virus and/or packaging cell line to form infectious particles. The resulting virus is capable of infecting cells and can express a polynucleotide of interest which is operably linked to a promoter, but cannot replicate in most cells. Replication deficient adenoviruses may be deleted in one or more of all or a portion of the following genes: Ela, Elb, E3, E4, E2a, or L1 through L5.

[0761] In certain other embodiments, the cells are engineered, ex vivo or in vivo, using an adeno-associated virus (AAV). AAVs are naturally occurring defective viruses that require helper viruses to produce infectious particles (Muzyczka, Curr. Topics in Microbiol. Immunol., 158:97 (1992)). It is also one of the few viruses that may integrate its DNA into non-dividing cells. Vectors containing as little as 300 base pairs of AAV can be packaged and can integrate, but space for exogenous DNA is limited to about 4.5 kb. Methods for producing and using such AAVs are known in the art. See, for example, U.S. Pat. Nos. 5,139,941, 5,173,414, 5,354,678, 5,436,146, 5,474,935, 5,478,745, and 5,589,377.

[0762] For example, an appropriate AAV vector for use in the present invention will include all the sequences necessary for DNA replication, encapsidation, and host-cell integration. The polynucleotide construct containing polynucleotides of the invention is inserted into the AAV vector using standard cloning methods, such as those found in Sambrook et al., Molecular Cloning: A Laboratory Manual, Cold Spring Harbor Press (1989). The recombinant AAV vector is then transfected into packaging cells which are infected with a helper virus, using any standard technique, including lipofection, electroporation, calcium phosphate precipitation, etc. Appropriate helper viruses include adenoviruses, cytomegaloviruses, vaccinia viruses, or herpes viruses. Once the packaging cells are transfected and infected, they will produce infectious AAV viral particles which contain the polynucleotide construct of the invention. These viral particles are then used to transduce eukaryotic cells, either ex vivo or in vivo. The transduced cells will contain the polynucleotide construct integrated into its genome, and will express the desired gene product.

[0763] Another method of gene therapy involves operably associating heterologous control regions and endogenous polynucleotide sequences (e.g. encoding the polypeptide sequence of interest) via homologous recombination (see, e.g., U.S. Pat. No.: 5,641,670, issued Jun. 24, 1997; International Publication No.: WO 96/29411, published Sep. 26, 1996; International Publication No.: WO 94/12650, published Aug. 4, 1994; Koller et al., Proc. Natl. Acad. Sci. USA, 86:8932-8935 (1989); and Zijlstra et al., Nature, 342:435-438 (1989). This method involves the activation of a gene which is present in the target cells, but which is not normally expressed in the cells, or is expressed at a lower level than desired.

[0764] Polynucleotide constructs are made, using standard techniques known in the art, which contain the promoter with targeting sequences flanking the promoter. Suitable promoters are described herein. The targeting sequence is sufficiently complementary to an endogenous sequence to permit homologous recombination of the promoter-targeting sequence with the endogenous sequence. The targeting sequence will be sufficiently near the 5′ end of the desired endogenous polynucleotide sequence so the promoter will be operably linked to the endogenous sequence upon homologous recombination.

[0765] The promoter and the targeting sequences can be amplified using PCR. Preferably, the amplified promoter contains distinct restriction enzyme sites on the 5′ and 3′ ends. Preferably, the 3′ end of the first targeting sequence contains the same restriction enzyme site as the 5 end of the amplified promoter and the 5′ end of the second targeting sequence contains the same restriction site as the 3′ end of the amplified promoter. The amplified promoter and targeting sequences are digested and ligated together.

[0766] The promoter-targeting sequence construct is delivered to the cells, either as naked polynucleotide, or in conjunction with transfection-facilitating agents, such as liposomes, viral sequences, viral particles, whole viruses, lipofection, precipitating agents, etc., described in more detail above. The P promoter-targeting sequence can be delivered by any method, included direct needle injection, intravenous injection, topical administration, catheter infusion, particle accelerators, etc. The methods are described in more detail below.

[0767] The promoter-targeting sequence construct is taken up by cells. Homologous recombination between the construct and the endogenous sequence takes place, such that an endogenous sequence is placed under the control of the promoter. The promoter then drives the expression of the endogenous sequence.

[0768] The polynucleotides encoding polypeptides of the present invention may be administered along with other polynucleotides encoding angiogenic proteins. Angiogenic proteins include, but are not limited to, acidic and basic fibroblast growth factors, VEGF-1, VEGF-2 (VEGF-C), VEGF-3 (VEGF-B), epidermal growth factor alpha and beta, platelet-derived endothelial cell growth factor, platelet-derived growth factor, tumor necrosis factor alpha, hepatocyte growth factor, insulin like growth factor, colony stimulating factor, macrophage colony stimulating factor, granulocyte/macrophage colony stimulating factor, and nitric oxide synthase.

[0769] Preferably, the polynucleotide encoding a polypeptide of the invention contains a secretory signal sequence that facilitates secretion of the protein. Typically, the signal sequence is positioned in the coding region of the polynucleotide to be expressed towards or at the 5′ end of the coding region. The signal sequence may be homologous or heterologous to the polynucleotide of interest and may be homologous or heterologous to the cells to be transfected. Additionally, the signal sequence may be chemically synthesized using methods known in the art.

[0770] Any mode of administration of any of the above-described polynucleotides constructs can be used so long as the mode results in the expression of one or more molecules in an amount sufficient to provide a therapeutic effect. This includes direct needle injection, systemic injection, catheter infusion, biolistic injectors, particle accelerators (i.e., “gene guns”), gelfoam sponge depots, other commercially available depot materials, osmotic pumps (e.g., Alza minipumps), oral or suppositorial solid (tablet or pill) pharmaceutical formulations, and decanting or topical applications during surgery. For example, direct injection of naked calcium phosphate-precipitated plasmid into rat liver and rat spleen or a protein-coated plasmid into the portal vein has resulted in gene expression of the foreign gene in the rat livers. (Kaneda et al., Science, 243:375 (1989)).

[0771] A preferred method of local administration is by direct injection. Preferably, a recombinant molecule of the present invention complexed with a delivery vehicle is administered by direct injection into or locally within the area of arteries. Administration of a composition locally within the area of arteries refers to injecting the composition centimeters and preferably, millimeters within arteries.

[0772] Another method of local administration is to contact a polynucleotide construct of the present invention in or around a surgical wound. For example, a patient can undergo surgery and the polynucleotide construct can be coated on the surface of tissue inside the wound or the construct can be injected into areas of tissue inside the wound.

[0773] Therapeutic compositions useful in systemic administration, include recombinant molecules of the present invention complexed to a targeted delivery vehicle of the present invention. Suitable delivery vehicles for use with systemic administration comprise liposomes comprising ligands for targeting the vehicle to a particular site.

[0774] Preferred methods of systemic administration, include intravenous injection, aerosol, oral and percutaneous (topical) delivery. Intravenous injections can be performed using methods standard in the art. Aerosol delivery can also be performed using methods standard in the art (see, for example, Stribling et al., Proc. Natl. Acad. Sci. USA, 189:11277-11281 (1992), which is incorporated herein by reference). Oral delivery can be performed by complexing a polynucleotide construct of the present invention to a carrier capable of withstanding degradation by digestive enzymes in the gut of an animal. Examples of such carriers, include plastic capsules or tablets, such as those known in the art. Topical delivery can be performed by mixing a polynucleotide construct of the present invention with a lipophilic reagent (e.g., DMSO) that is capable of passing into the skin.

[0775] Determining an effective amount of substance to be delivered can depend upon a number of factors including, for example, the chemical structure and biological activity of the substance, the age and weight of the animal, the precise condition requiring treatment and its severity, and the route of administration. The frequency of treatments depends upon a number of factors, such as the amount of polynucleotide constructs administered per dose, as well as the health and history of the subject. The precise amount, number of doses, and timing of doses will be determined by the attending physician or veterinarian. Therapeutic compositions of the present invention can be administered to any animal, preferably to mammals and birds. Preferred mammals include humans, dogs, cats, mice, rats, rabbits sheep, cattle, horses and pigs, with humans being particularly preferred.

[0776] Biological Activities

[0777] The polynucleotides or polypeptides, or agonists or antagonists of the present invention can be used in assays to test for one or more biological activities. If these polynucleotides and polypeptides do exhibit activity in a particular assay, it is likely that these molecules may be involved in the diseases associated with the biological activity. Thus, the polynucleotides or polypeptides, or agonists or antagonists could be used to treat the associated disease.

[0778] Immune Activity

[0779] The polynucleotides or polypeptides, or agonists or antagonists of the present invention may be useful in treating, preventing, and/or diagnosing diseases, disorders, and/or conditions of the immune system, by activating or inhibiting the proliferation, differentiation, or mobilization (chemotaxis) of immune cells. Immune cells develop through a process called hematopoiesis, producing myeloid (platelets, red blood cells, neutrophils, and macrophages) and lymphoid (B and T lymphocytes) cells from pluripotent stem cells. The etiology of these immune diseases, disorders, and/or conditions may be genetic, somatic, such as cancer or some autoimmune diseases, disorders, and/or conditions, acquired (e.g., by chemotherapy or toxins), or infectious. Moreover, a polynucleotides or polypeptides, or agonists or antagonists of the present invention can be used as a marker or detector of a particular immune system disease or disorder.

[0780] A polynucleotides or polypeptides, or agonists or antagonists of the present invention may be useful in treating, preventing, and/or diagnosing diseases, disorders, and/or conditions of hematopoietic cells. A polynucleotides or polypeptides, or agonists or antagonists of the present invention could be used to increase differentiation and proliferation of hematopoietic cells, including the pluripotent stem cells, in an effort to treat or prevent those diseases, disorders, and/or conditions associated with a decrease in certain (or many) types hematopoietic cells. Examples of immunologic deficiency syndromes include, but are not limited to: blood protein diseases, disorders, and/or conditions (e.g. agammaglobulinemia, dysgammaglobulinemia), ataxia telangiectasia, common variable immunodeficiency, Digeorge Syndrome, HIV infection, HTLV-BLV infection, leukocyte adhesion deficiency syndrome, lymphopenia, phagocyte bactericidal dysfunction, severe combined immunodeficiency (SCIDs), Wiskott-Aldrich Disorder, anemia, thrombocytopenia, or hemoglobinuria.

[0781] Moreover, a polynucleotides or polypeptides, or agonists or antagonists of the present invention could also be used to modulate hemostatic (the stopping of bleeding) or thrombolytic activity (clot formation). For example, by increasing hemostatic or thrombolytic activity, a polynucleotides or polypeptides, or agonists or antagonists of the present invention could be used to treat or prevent blood coagulation diseases, disorders, and/or conditions (e.g., afibrinogenemia, factor deficiencies, arterial thrombosis, venous thrombosis, etc.), blood platelet diseases, disorders, and/or conditions (e.g. thrombocytopenia), or wounds resulting from trauma, surgery, or other causes. Alternatively, a polynucleotides or polypeptides, or agonists or antagonists of the present invention that can decrease hemostatic or thrombolytic activity could be used to inhibit or dissolve clotting. Polynucleotides or polypeptides, or agonists or antagonists of the present invention are may also be useful for the detection, prognosis, treatment, and/or prevention of heart attacks (infarction), strokes, scarring, fibrinolysis, uncontrolled bleeding, uncontrolled coagulation, uncontrolled complement fixation, and/or inflammation.

[0782] A polynucleotides or polypeptides, or agonists or antagonists of the present invention may also be useful in treating, preventing, and/or diagnosing autoimmune diseases, disorders, and/or conditions. Many autoimmune diseases, disorders, and/or conditions result from inappropriate recognition of self as foreign material by immune cells. This inappropriate recognition results in an immune response leading to the destruction of the host tissue. Therefore, the administration of a polynucleotides or polypeptides, or agonists or antagonists of the present invention that inhibits an immune response, particularly the proliferation, differentiation, or chemotaxis of T-cells, may be an effective therapy in preventing autoimmune diseases, disorders, and/or conditions.

[0783] Examples of autoimmune diseases, disorders, and/or conditions that can be treated, prevented, and/or diagnosed or detected by the present invention include, but are not limited to: Addison's Disease, hemolytic anemia, antiphospholipid syndrome, rheumatoid arthritis, dermatitis, allergic encephalomyelitis, glomerulonephritis, Goodpasture's Syndrome, Graves' Disease, Multiple Sclerosis, Myasthenia Gravis, Neuritis, Ophthalmia, Bullous Pemphigoid, Pemphigus, Polyendocrinopathies, Purpura, Reiter's Disease, Stiff-Man Syndrome, Autoimmune Thyroiditis, Systemic Lupus Erythematosus, Autoimmune Pulmonary Inflammation, Guillain-Barre Syndrome, insulin dependent diabetes mellitis, and autoimmune inflammatory eye disease.

[0784] Similarly, allergic reactions and conditions, such as asthma (particularly allergic asthma) or other respiratory problems, may also be treated, prevented, and/or diagnosed by polynucleotides or polypeptides, or agonists or antagonists of the present invention. Moreover, these molecules can be used to treat anaphylaxis, hypersensitivity to an antigenic molecule, or blood group incompatibility.

[0785] A polynucleotides or polypeptides, or agonists or antagonists of the present invention may also be used to treat, prevent, and/or diagnose organ rejection or graft-versus-host disease (GVHD). Organ rejection occurs by host immune cell destruction of the transplanted tissue through an immune response. Similarly, an immune response is also involved in GVHD, but, in this case, the foreign transplanted immune cells destroy the host tissues. The administration of a polynucleotides or polypeptides, or agonists or antagonists of the present invention that inhibits an immune response, particularly the proliferation, differentiation, or chemotaxis of T-cells, may be an effective therapy in preventing organ rejection or GVHD.

[0786] Similarly, a polynucleotides or polypeptides, or agonists or antagonists of the present invention may also be used to modulate inflammation. For example, the polypeptide or polynucleotide or agonists or antagonist may inhibit the proliferation and differentiation of cells involved in an inflammatory response. These molecules can be used to treat, prevent, and/or diagnose inflammatory conditions, both chronic and acute conditions, including chronic prostatitis, granulomatous prostatitis and malacoplakia, inflammation associated with infection (e.g., septic shock, sepsis, or systemic inflammatory response syndrome (SIRS)), ischemia-reperfusion injury, endotoxin lethality, arthritis, complement-mediated hyperacute rejection, nephritis, cytokine or chemokine induced lung injury, inflammatory bowel disease, Crohn's disease, or resulting from over production of cytokines (e.g., TNF or IL-1.)

[0787] Hyperproliferative Disorders

[0788] A polynucleotides or polypeptides, or agonists or antagonists of the invention can be used to treat, prevent, and/or diagnose hyperproliferative diseases, disorders, and/or conditions, including neoplasms. A polynucleotides or polypeptides, or agonists or antagonists of the present invention may inhibit the proliferation of the disorder through direct or indirect interactions. Alternatively, a polynucleotides or polypeptides, or agonists or antagonists of the present invention may proliferate other cells which can inhibit the hyperproliferative disorder.

[0789] For example, by increasing an immune response, particularly increasing antigenic qualities of the hyperproliferative disorder or by proliferating, differentiating, or mobilizing T-cells, hyperproliferative diseases, disorders, and/or conditions can be treated, prevented, and/or diagnosed. This immune response may be increased by either enhancing an existing immune response, or by initiating a new immune response. Alternatively, decreasing an immune response may also be a method of treating, preventing, and/or diagnosing hyperproliferative diseases, disorders, and/or conditions, such as a chemotherapeutic agent.

[0790] Examples of hyperproliferative diseases, disorders, and/or conditions that can be treated, prevented, and/or diagnosed by polynucleotides or polypeptides, or agonists or antagonists of the present invention include, but are not limited to neoplasms located in the: colon, abdomen, bone, breast, digestive system, liver, pancreas, peritoneum, endocrine glands (adrenal, parathyroid, pituitary, testicles, ovary, thymus, thyroid), eye, head and neck, nervous (central and peripheral), lymphatic system, pelvic, skin, soft tissue, spleen, thoracic, and urogenital.

[0791] Similarly, other hyperproliferative diseases, disorders, and/or conditions can also be treated, prevented, and/or diagnosed by a polynucleotides or polypeptides, or agonists or antagonists of the present invention. Examples of such hyperproliferative diseases, disorders, and/or conditions include, but are not limited to: hypergammaglobulinemia, lymphoproliferative diseases, disorders, and/or conditions, paraproteinemias, purpura, sarcoidosis, Sezary Syndrome, Waldenstron's Macroglobulinemia, Gaucher's Disease, histiocytosis, and any other hyperproliferative disease, besides neoplasia, located in an organ system listed above.

[0792] One preferred embodiment utilizes polynucleotides of the present invention to inhibit aberrant cellular division, by gene therapy using the present invention, and/or protein fusions or fragments thereof.

[0793] Thus, the present invention provides a method for treating or preventing cell proliferative diseases, disorders, and/or conditions by inserting into an abnormally proliferating cell a polynucleotide of the present invention, wherein said polynucleotide represses said expression.

[0794] Another embodiment of the present invention provides a method of treating or preventing cell-proliferative diseases, disorders, and/or conditions in individuals comprising administration of one or more active gene copies of the present invention to an abnormally proliferating cell or cells. In a preferred embodiment, polynucleotides of the present invention is a DNA construct comprising a recombinant expression vector effective in expressing a DNA sequence encoding said polynucleotides. In another preferred embodiment of the present invention, the DNA construct encoding the polynucleotides of the present invention is inserted into cells to be treated utilizing a retrovirus, or more Preferably an adenoviral vector (See G J. Nabel, et. al., PNAS 1999 96: 324-326, which is hereby incorporated by reference). In a most preferred embodiment, the viral vector is defective and will not transform non-proliferating cells, only proliferating cells. Moreover, in a preferred embodiment, the polynucleotides of the present invention inserted into proliferating cells either alone, or in combination with or fused to other polynucleotides, can then be modulated via an external stimulus (i.e. magnetic, specific small molecule, chemical, or drug administration, etc.), which acts upon the promoter upstream of said polynucleotides to induce expression of the encoded protein product. As such the beneficial therapeutic affect of the present invention may be expressly modulated (i.e. to increase, decrease, or inhibit expression of the present invention) based upon said external stimulus.

[0795] Polynucleotides of the present invention may be useful in repressing expression of oncogenic genes or antigens. By “repressing expression of the oncogenic genes ” is intended the suppression of the transcription of the gene, the degradation of the gene transcript (pre-message RNA), the inhibition of splicing, the destruction of the messenger RNA, the prevention of the post-translational modifications of the protein, the destruction of the protein, or the inhibition of the normal function of the protein.

[0796] For local administration to abnormally proliferating cells, polynucleotides of the present invention may be administered by any method known to those of skill in the art including, but not limited to transfection, electroporation, microinjection of cells, or in vehicles such as liposomes, lipofectin, or as naked polynucleotides, or any other method described throughout the specification. The polynucleotide of the present invention may be delivered by known gene delivery systems such as, but not limited to, retroviral vectors (Gilboa, J. Virology 44:845 (1982); Hocke, Nature 320:275 (1986); Wilson, et al., Proc. Natl. Acad. Sci. U.S.A. 85:3014), vaccinia virus system (Chakrabarty et al., Mol. Cell Biol. 5:3403 (1985) or other efficient DNA delivery systems (Yates et al., Nature 313:812 (1985)) known to those skilled in the art. These references are exemplary only and are hereby incorporated by reference. In order to specifically deliver or transfect cells which are abnormally proliferating and spare non-dividing cells, it is preferable to utilize a retrovirus, or adenoviral (as described in the art and elsewhere herein) delivery system known to those of skill in the art. Since host DNA replication is required for retroviral DNA to integrate and the retrovirus will be unable to self replicate due to the lack of the retrovirus genes needed for its life cycle. Utilizing such a retroviral delivery system for polynucleotides of the present invention will target said gene and constructs to abnormally proliferating cells and will spare the non-dividing normal cells.

[0797] The polynucleotides of the present invention may be delivered directly to cell proliferative disorder/disease sites in internal organs, body cavities and the like by use of imaging devices used to guide an injecting needle directly to the disease site. The polynucleotides of the present invention may also be administered to disease sites at the time of surgical intervention.

[0798] By “cell proliferative disease” is meant any human or animal disease or disorder, affecting any one or any combination of organs, cavities, or body parts, which is characterized by single or multiple local abnormal proliferations of cells, groups of cells, or tissues, whether benign or malignant.

[0799] Any amount of the polynucleotides of the present invention may be administered as long as it has a biologically inhibiting effect on the proliferation of the treated cells. Moreover, it is possible to administer more than one of the polynucleotide of the present invention simultaneously to the same site. By “biologically inhibiting” is meant partial or total growth inhibition as well as decreases in the rate of proliferation or growth of the cells. The biologically inhibitory dose may be determined by assessing the effects of the polynucleotides of the present invention on target malignant or abnormally proliferating cell growth in tissue culture, tumor growth in animals and cell cultures, or any other method known to one of ordinary skill in the art.

[0800] The present invention is further directed to antibody-based therapies which involve administering of anti-polypeptides and anti-polynucleotide antibodies to a mammalian, preferably human, patient for treating, preventing, and/or diagnosing one or more of the described diseases, disorders, and/or conditions. Methods for producing anti-polypeptides and anti-polynucleotide antibodies polyclonal and monoclonal antibodies are described in detail elsewhere herein. Such antibodies may be provided in pharmaceutically acceptable compositions as known in the art or as described herein.

[0801] A summary of the ways in which the antibodies of the present invention may be used therapeutically includes binding polynucleotides or polypeptides of the present invention locally or systemically in the body or by direct cytotoxicity of the antibody, e.g. as mediated by complement (CDC) or by effector cells (ADCC). Some of these approaches are described in more detail below. Armed with the teachings provided herein, one of ordinary skill in the art will know how to use the antibodies of the present invention for diagnostic, monitoring or therapeutic purposes without undue experimentation.

[0802] In particular, the antibodies, fragments and derivatives of the present invention are useful for treating, preventing, and/or diagnosing a subject having or developing cell proliferative and/or differentiation diseases, disorders, and/or conditions as described herein. Such treatment comprises administering a single or multiple doses of the antibody, or a fragment, derivative, or a conjugate thereof.

[0803] The antibodies of this invention may be advantageously utilized in combination with other monoclonal or chimeric antibodies, or with lymphokines or hematopoietic growth factors, for example, which serve to increase the number or activity of effector cells which interact with the antibodies.

[0804] It is preferred to use high affinity and/or potent in vivo inhibiting and/or neutralizing antibodies against polypeptides or polynucleotides of the present invention, fragments or regions thereof, for both immunoassays directed to and therapy of diseases, disorders, and/or conditions related to polynucleotides or polypeptides, including fragments thereof, of the present invention. Such antibodies, fragments, or regions, will preferably have an affinity for polynucleotides or polypeptides, including fragments thereof. Preferred binding affinities include those with a dissociation constant or Kd less than 5×10-6M, 10-6M, 5×10-7M, 10-7M, 5×10-8M, 10-8M, 5×10-9M, 10-9M, 5×10-10M, 10-10M, 5×10-11M, 10-11M, 5×10-12M, 10-12M, 5×10-13M, 10-13M, 5×10-14M, 10-14M, 5×10-15M, and 10-15M.

[0805] Moreover, polypeptides of the present invention may be useful in inhibiting the angiogenesis of proliferative cells or tissues, either alone, as a protein fusion, or in combination with other polypeptides directly or indirectly, as described elsewhere herein. In a most preferred embodiment, said anti-angiogenesis effect may be achieved indirectly, for example, through the inhibition of hematopoietic, tumor-specific cells, such as tumor-associated macrophages (See Joseph IB, et al. J Natl Cancer Inst, 90(21):1648-53 (1998), which is hereby incorporated by reference). Antibodies directed to polypeptides or polynucleotides of the present invention may also result in inhibition of angiogenesis directly, or indirectly (See Witte L, et al., Cancer Metastasis Rev. 17(2):155-61 (1998), which is hereby incorporated by reference)).

[0806] Polypeptides, including protein fusions, of the present invention, or fragments thereof may be useful in inhibiting proliferative cells or tissues through the induction of apoptosis. Said polypeptides may act either directly, or indirectly to induce apoptosis of proliferative cells and tissues, for example in the activation of a death-domain receptor, such as tumor necrosis factor (TNF) receptor-i, CD95 (Fas/APO-1), TNF-receptor-related apoptosis-mediated protein (TRAMP) and TNF-related apoptosis-inducing ligand (TRAIL) receptor-i and -2 (See Schulze-Osthoff K, et al., Eur J Biochem 254(3):439-59 (1998), which is hereby incorporated by reference). Moreover, in another preferred embodiment of the present invention, said polypeptides may induce apoptosis through other mechanisms, such as in the activation of other proteins which will activate apoptosis, or through stimulating the expression of said proteins, either alone or in combination with small molecule drugs or adjuvants, such as apoptonin, galectins, thioredoxins, antiinflammatory proteins (See for example, Mutat. Res. 400(1-2):447-55 (1998), Med Hypotheses.50(5):423-33 (1998), Chem. Biol. Interact. Apr 24;111-112:23-34 (1998), J Mol Med.76(6):402-12 (1998), Int. J. Tissue React. 20(1):3-15 (1998), which are all hereby incorporated by reference).

[0807] Polypeptides, including protein fusions to, or fragments thereof, of the present invention are useful in inhibiting the metastasis of proliferative cells or tissues. Inhibition may occur as a direct result of administering polypeptides, or antibodies directed to said polypeptides as described elsewhere herein, or indirectly, such as activating the expression of proteins known to inhibit metastasis, for example alpha 4 integrins, (See, e.g., Curr Top Microbiol Immunol 1998;231:125-41, which is hereby incorporated by reference). Such therapeutic affects of the present invention may be achieved either alone, or in combination with small molecule drugs or adjuvants.

[0808] In another embodiment, the invention provides a method of delivering compositions containing the polypeptides of the invention (e.g., compositions containing polypeptides or polypeptide antibodies associated with heterologous polypeptides, heterologous nucleic acids, toxins, or prodrugs) to targeted cells expressing the polypeptide of the present invention. Polypeptides or polypeptide antibodies of the invention may be associated with heterologous polypeptides, heterologous nucleic acids, toxins, or prodrugs via hydrophobic, hydrophilic, ionic and/or covalent interactions.

[0809] Polypeptides, protein fusions to, or fragments thereof, of the present invention are useful in enhancing the immunogenicity and/or antigenicity of proliferating cells or tissues, either directly, such as would occur if the polypeptides of the present invention ‘vaccinated’ the immune response to respond to proliferative antigens and immunogens, or indirectly, such as in activating the expression of proteins known to enhance the immune response (e.g. chemokines), to said antigens and immunogens.

[0810] Cardiovascular Disorders

[0811] Polynucleotides or polypeptides, or agonists or antagonists of the invention may be used to treat, prevent, and/or diagnose cardiovascular diseases, disorders, and/or conditions, including peripheral artery disease, such as limb ischemia.

[0812] Cardiovascular diseases, disorders, and/or conditions include cardiovascular abnormalities, such as arterio-arterial fistula, arteriovenous fistula, cerebral arteriovenous malformations, congenital heart defects, pulmonary atresia, and Scimitar Syndrome. Congenital heart defects include aortic coarctation, cor triatriatum, coronary vessel anomalies, crisscross heart, dextrocardia, patent ductus arteriosus, Ebstein's anomaly, Eisenmenger complex, hypoplastic left heart syndrome, levocardia, tetralogy of fallot, transposition of great vessels, double outlet right ventricle, tricuspid atresia, persistent truncus arteriosus, and heart septal defects, such as aortopulmonary septal defect, endocardial cushion defects, Lutembacher's Syndrome, trilogy of Fallot, ventricular heart septal defects.

[0813] Cardiovascular diseases, disorders, and/or conditions also include heart disease, such as arrhythmias, carcinoid heart disease, high cardiac output, low cardiac output, cardiac tamponade, endocarditis (including bacterial), heart aneurysm, cardiac arrest, congestive heart failure, congestive cardiomyopathy, paroxysmal dyspnea, cardiac edema, heart hypertrophy, congestive cardiomyopathy, left ventricular hypertrophy, right ventricular hypertrophy, post-infarction heart rupture, ventricular septal rupture, heart valve diseases, myocardial diseases, myocardial ischemia, pericardial effusion, pericarditis (including constrictive and tuberculous), pneumopericardium, postpericardiotomy syndrome, pulmonary heart disease, rheumatic heart disease, ventricular dysfunction, hyperemia, cardiovascular pregnancy complications, Scimitar Syndrome, cardiovascular syphilis, and cardiovascular tuberculosis.

[0814] Arrhythmias include sinus arrhythmia, atrial fibrillation, atrial flutter, bradycardia, extrasystole, Adams-Stokes Syndrome, bundle-branch block, sinoatrial block, long QT syndrome, parasystole, Lown-Ganong-Levine Syndrome, Mahaim-type pre-excitation syndrome, Wolff-Parkinson-White syndrome, sick sinus syndrome, tachycardias, and ventricular fibrillation. Tachycardias include paroxysmal tachycardia, supraventricular tachycardia, accelerated idioventricular rhythm, atrioventricular nodal reentry tachycardia, ectopic atrial tachycardia, ectopic junctional tachycardia, sinoatrial nodal reentry tachycardia, sinus tachycardia, Torsades de Pointes, and ventricular tachycardia.

[0815] Heart valve disease include aortic valve insufficiency, aortic valve stenosis, hear murmurs, aortic valve prolapse, mitral valve prolapse, tricuspid valve prolapse, mitral valve insufficiency, mitral valve stenosis, pulmonary atresia, pulmonary valve insufficiency, pulmonary valve stenosis, tricuspid atresia, tricuspid valve insufficiency, and tricuspid valve stenosis.

[0816] Myocardial diseases include alcoholic cardiomyopathy, congestive cardiomyopathy, hypertrophic cardiomyopathy, aortic subvalvular stenosis, pulmonary subvalvular stenosis, restrictive cardiomyopathy, Chagas cardiomyopathy, endocardial fibroelastosis, endomyocardial fibrosis, Kearns Syndrome, myocardial reperfusion injury, and myocarditis.

[0817] Myocardial ischemias include coronary disease, such as angina pectoris, coronary aneurysm, coronary arteriosclerosis, coronary thrombosis, coronary vasospasm, myocardial infarction and myocardial stunning.

[0818] Cardiovascular diseases also include vascular diseases such as aneurysms, angiodysplasia, angiomatosis, bacillary angiomatosis, Hippel-Lindau Disease, Klippel-Trenaunay-Weber Syndrome, Sturge-Weber Syndrome, angioneurotic edema, aortic diseases, Takayasu's Arteritis, aortitis, Leriche's Syndrome, arferial occlusive diseases, arteritis, enarteritis, polyarteritis nodosa, cerebrovascular diseases, disorders, and/or conditions, diabetic angiopathies, diabetic retinopathy, embolisms, thrombosis, erythromelalgia, hemorrhoids, hepatic veno-occlusive disease, hypertension, hypotension, ischemia, peripheral vascular diseases, phlebitis, pulmonary veno-occlusive disease, Raynaud's disease, CREST syndrome, retinal vein occlusion, Scimitar syndrome, superior vena cava syndrome, telangiectasia, atacia telangiectasia, hereditary hemorrhagic telangiectasia, varicocele, varicose veins, varicose ulcer, vasculitis, and venous insufficiency.

[0819] Aneurysms include dissecting aneurysms, false aneurysms, infected aneurysms, ruptured aneurysms, aortic aneurysms, cerebral aneurysms, coronary aneurysms, heart aneurysms, and iliac aneurysms.

[0820] Arterial occlusive diseases include arteriosclerosis, intermittent claudication, carotid stenosis, fibromuscular dysplasias, mesenteric vascular occlusion, Moyamoya disease, renal artery obstruction, retinal artery occlusion, and thromboangiitis obliterans.

[0821] Cerebrovascular diseases, disorders, and/or conditions include carotid artery diseases, cerebral amyloid angiopathy, cerebral aneurysm, cerebral anoxia, cerebral arteriosclerosis, cerebral arteriovenous malformation, cerebral artery diseases, cerebral embolism and thrombosis, carotid artery thrombosis, sinus thrombosis, Wallenberg's syndrome, cerebral hemorrhage, epidural hematoma, subdural hematoma, subaraxhnoid hemorrhage, cerebral infarction, cerebral ischemia (including transient), subclavian steal syndrome, periventricular leukomalacia, vascular headache, cluster headache, migraine, and vertebrobasilar insufficiency.

[0822] Embolisms include air embolisms, amniotic fluid embolisms, cholesterol embolisms, blue toe syndrome, fat embolisms, pulmonary embolisms, and thromoboembolisms. Thrombosis include coronary thrombosis, hepatic vein thrombosis, retinal vein occlusion, carotid artery thrombosis, sinus thrombosis, Wallenberg's syndrome, and thrombophlebitis.

[0823] Ischemia includes cerebral ischemia, ischemic colitis, compartment syndromes, anterior compartment syndrome, myocardial ischemia, reperfusion injuries, and peripheral limb ischemia. Vasculitis includes aortitis, arteritis, Behcet's Syndrome, Churg-Strauss Syndrome, mucocutaneous lymph node syndrome, thromboangiitis obliterans, hypersensitivity vasculitis, Schoenlein-Henoch purpura, allergic cutaneous vasculitis, and Wegener's granulomatosis.

[0824] Polynucleotides or polypeptides, or agonists or antagonists of the invention, are especially effective for the treatment of critical limb ischemia and coronary disease.

[0825] Polypeptides may be administered using any method known in the art, including, but not limited to, direct needle injection at the delivery site, intravenous injection, topical administration, catheter infusion, biolistic injectors, particle accelerators, gelfoam sponge depots, other commercially available depot materials, osmotic pumps, oral or suppositorial solid pharmaceutical formulations, decanting or topical applications during surgery, aerosol delivery. Such methods are known in the art. Polypeptides of the invention may be administered as part of a Therapeutic, described in more detail below. Methods of delivering polynucleotides of the invention are described in more detail herein.

[0826] Anti-Angiogenesis Activity

[0827] The naturally occurring balance between endogenous stimulators and inhibitors of angiogenesis is one in which inhibitory influences predominate. Rastinejad et al., Cell 56:345-355 (1989). In those rare instances in which neovascularization occurs under normal physiological conditions, such as wound healing, organ regeneration, embryonic development, and female reproductive processes, angiogenesis is stringently regulated and spatially and temporally delimited. Under conditions of pathological angiogenesis such as that characterizing solid tumor growth, these regulatory controls fail. Unregulated angiogenesis becomes pathologic and sustains progression of many neoplastic and non-neoplastic diseases. A number of serious diseases are dominated by abnormal neovascularization including solid tumor growth and metastases, arthritis, some types of eye diseases, disorders, and/or conditions, and psoriasis. See, e.g., reviews by Moses et al., Biotech. 9:630-634 (1991); Folkman et al., N. Engl. J. Med., 333:1757-1763 (1995); Auerbach et al., J. Microvasc. Res. 29:401-411 (1985); Folkman, Advances in Cancer Research, eds. Klein and Weinhouse, Academic Press, New York, pp. 175-203 (1985); Patz, Am. J. Opthalmol. 94:715-743 (1982); and Folkman et al., Science 221:719-725 (1983). In a number of pathological conditions, the process of angiogenesis contributes to the disease state. For example, significant data have accumulated which suggest that the growth of solid tumors is dependent on angiogenesis. Folkman and Klagsbrun, Science 235:442-447 (1987).

[0828] The present invention provides for treatment of diseases, disorders, and/or conditions associated with neovascularization by administration of the polynucleotides and/or polypeptides of the invention, as well as agonists or antagonists of the present invention. Malignant and metastatic conditions which can be treated with the polynucleotides and polypeptides, or agonists or antagonists of the invention include, but are not limited to, malignancies, solid tumors, and cancers described herein and otherwise known in the art (for a review of such disorders, see Fishman et al., Medicine, 2d Ed., J. B. Lippincott Co., Philadelphia (1985)).Thus, the present invention provides a method of treating, preventing, and/or diagnosing an -angiogenesis-related disease and/or disorder, comprising administering to an individual in need thereof a therapeutically effective amount of a polynucleotide, polypeptide, antagonist and/or agonist of the invention. For example, polynucleotides, polypeptides, antagonists and/or agonists may be utilized in a variety of additional methods in order to therapeutically treat or prevent a cancer or tumor. Cancers which may be treated, prevented, and/or diagnosed with polynucleotides, polypeptides, antagonists and/or agonists include, but are not limited to solid tumors, including prostate, lung, breast, ovarian, stomach, pancreas, larynx, esophagus, testes, liver, parotid, biliary tract, colon, rectum, cervix, uterus, endometrium, kidney, bladder, thyroid cancer; primary tumors and metastases; melanomas; glioblastoma; Kaposi's sarcoma; leiomyosarcoma; non- small cell lung cancer; colorectal cancer; advanced malignancies; and blood born tumors such as leukemias. For example, polynucleotides, polypeptides, antagonists and/or agonists may be delivered topically, in order to treat or prevent cancers such as skin cancer, head and neck tumors, breast tumors, and Kaposi's sarcoma.

[0829] Within yet other aspects, polynucleotides, polypeptides, antagonists and/or agonists may be utilized to treat superficial forms of bladder cancer by, for example, intravesical administration. Polynucleotides, polypeptides, antagonists and/or agonists may be delivered directly into the tumor, or near the tumor site, via injection or a catheter. Of course, as the artisan of ordinary skill will appreciate, the appropriate mode of administration will vary according to the cancer to be treated. Other modes of delivery are discussed herein.

[0830] Polynucleotides, polypeptides, antagonists and/or agonists may be useful in treating, preventing, and/or diagnosing other diseases, disorders, and/or conditions, besides cancers, which involve angiogenesis. These diseases, disorders, and/or conditions include, but are not limited to: benign tumors, for example hemangiomas, acoustic neuromas, neurofibromas, trachomas, and pyogenic granulomas; artheroscleric plaques; ocular angiogenic diseases, for example, diabetic retinopathy, retinopathy of prematurity, macular degeneration, corneal graft rejection, neovascular glaucoma, retrolental fibroplasia, rubeosis, retinoblastoma, uvietis and Pterygia (abnormal blood vessel growth) of the eye; rheumatoid arthritis; psoriasis; delayed wound healing; endometriosis; vasculogenesis; granulations; hypertrophic scars (keloids); nonunion fractures; scleroderma; trachoma; vascular adhesions; myocardial angiogenesis; coronary collaterals; cerebral collaterals; arteriovenous malformations; ischemic limb angiogenesis; Osler-Webber Syndrome; plaque neovascularization; telangiectasia; hemophiliac joints; angiofibroma; fibromuscular dysplasia; wound granulation; Crohn's disease; and atherosclerosis.

[0831] For example, within one aspect of the present invention methods are provided for treating, preventing, and/or diagnosing hypertrophic scars and keloids, comprising the step of administering a polynucleotide, polypeptide, antagonist and/or agonist of the invention to a hypertrophic scar or keloid.

[0832] Within one embodiment of the present invention polynucleotides, polypeptides, antagonists and/or agonists are directly injected into a hypertrophic scar or keloid, in order to prevent the progression of these lesions. This therapy is of particular value in the prophylactic treatment of conditions which are known to result in the development of hypertrophic scars and keloids (e.g., bums), and is preferably initiated after the proliferative phase has had time to progress (approximately 14 days after the initial injury), but before hypertrophic scar or keloid development. As noted above, the present invention also provides methods for treating, preventing, and/or diagnosing neovascular diseases of the eye, including for example, corneal neovascularization, neovascular glaucoma, proliferative diabetic retinopathy, retrolental fibroplasia and macular degeneration.

[0833] Moreover, Ocular diseases, disorders, and/or conditions associated with neovascularization which can be treated, prevented, and/or diagnosed with the polynucleotides and polypeptides of the present invention (including agonists and/or antagonists) include, but are not limited to: neovascular glaucoma, diabetic retinopathy, retinoblastoma, retrolental fibroplasia, uveitis, retinopathy of prematurity macular degeneration, corneal graft neovascularization, as well as other eye inflammatory diseases, ocular tumors and diseases associated with choroidal or iris neovascularization. See, e.g., reviews by Waltman et al., Am. J. Ophthal. 85:704-710 (1978) and Gartner et al., Surv. Ophthal. 22:291-312 (1978).

[0834] Thus, within one aspect of the present invention methods are provided for treating or preventing neovascular diseases of the eye such as corneal neovascularization (including corneal graft neovascularization), comprising the step of administering to a patient a therapeutically effective amount of a compound (as described above) to the cornea, such that the formation of blood vessels is inhibited. Briefly, the cornea is a tissue which normally lacks blood vessels. In certain pathological conditions however, capillaries may extend into the cornea from the pericorneal vascular plexus of the limbus. When the cornea becomes vascularized, it also becomes clouded, resulting in a decline in the patient's visual acuity. Visual loss may become complete if the cornea completely opacitates. A wide variety of diseases, disorders, and/or conditions can result in corneal neovascularization, including for example, corneal infections (e.g., trachoma, herpes simplex keratitis, leishmaniasis and onchocerciasis), immunological processes (e.g., graft rejection and Stevens-Johnson's syndrome), alkali burns, trauma, inflammation (of any cause), toxic and nutritional deficiency states, and as a complication of wearing contact lenses.

[0835] Within particularly preferred embodiments of the invention, may be prepared for topical administration in saline (combined with any of the preservatives and antimicrobial agents commonly used in ocular preparations), and administered in eyedrop form. The solution or suspension may be prepared in its pure form and administered several times daily. Alternatively, anti-angiogenic compositions, prepared as described above, may also be administered directly to the cornea. Within preferred embodiments, the anti-angiogenic composition is prepared with a muco-adhesive polymer which binds to cornea. Within further embodiments, the anti-angiogenic factors or anti-angiogenic compositions may be utilized as an adjunct to conventional steroid therapy. Topical therapy may also be useful prophylactically in corneal lesions which are known to have a high probability of inducing an angiogenic response (such as chemical bums). In these instances the treatment, likely in combination with steroids, may be instituted immediately to help prevent subsequent complications.

[0836] Within other embodiments, the compounds described above may be injected directly into the corneal stroma by an ophthalmologist under microscopic guidance. The preferred site of injection may vary with the morphology of the individual lesion, but the goal of the administration would be to place the composition at the advancing front of the vasculature (i.e., interspersed between the blood vessels and the normal cornea). In most cases this would involve perilimbic corneal injection to “protect” the cornea from the advancing blood vessels. This method may also be utilized shortly after a corneal insult in order to prophylactically prevent corneal neovascularization. In this situation the material could be injected in the perilimbic cornea interspersed between the corneal lesion and its undesired potential limbic blood supply. Such methods may also be utilized in a similar fashion to prevent capillary invasion of transplanted corneas. In a sustained-release form injections might only be required 2-3 times per year. A steroid could also be added to the injection solution to reduce inflammation resulting from the injection itself.

[0837] Within another aspect of the present invention, methods are provided for treating or preventing neovascular glaucoma, comprising the step of administering to a patient a therapeutically effective amount of a polynucleotide, polypeptide, antagonist and/or agonist to the eye, such that the formation of blood vessels is inhibited. In one embodiment, the compound may be administered topically to the eye in order to treat or prevent early forms of neovascular glaucoma. Within other embodiments, the compound may be implanted by injection into the region of the anterior chamber angle. Within other embodiments, the compound may also be placed in any location such that the compound is continuously released into the aqueous humor. Within another aspect of the present invention, methods are provided for treating or preventing proliferative diabetic retinopathy, comprising the step of administering to a patient a therapeutically effective amount of a polynucleotide, polypeptide, antagonist and/or agonist to the eyes, such that the formation of blood vessels is inhibited.

[0838] Within particularly preferred embodiments of the invention, proliferative diabetic retinopathy may be treated by injection into the aqueous humor or the vitreous, in order to increase the local concentration of the polynucleotide, polypeptide, antagonist and/or agonist in the retina. Preferably, this treatment should be initiated prior to the acquisition of severe disease requiring photocoagulation.

[0839] Within another aspect of the present invention, methods are provided for treating or preventing retrolental fibroplasia, comprising the step of administering to a patient a therapeutically effective amount of a polynucleotide, polypeptide, antagonist and/or agonist to the eye, such that the formation of blood vessels is inhibited. The compound may be administered topically, via intravitreous injection and/or via intraocular implants.

[0840] Additionally, diseases, disorders, and/or conditions which can be treated, prevented, and/or diagnosed with the polynucleotides, polypeptides, agonists and/or agonists include, but are not limited to, hemangioma, arthritis, psoriasis, angiofibroma, atherosclerotic plaques, delayed wound healing, granulations, hemophilic joints, hypertrophic scars, nonunion fractures, Osler-Weber syndrome, pyogenic granuloma, scleroderma, trachoma, and vascular adhesions.

[0841] Moreover, diseases, disorders, and/or conditions and/or states, which can be treated, prevented, and/or diagnosed with the polynucleotides, polypeptides, agonists and/or agonists include, but are not limited to, solid tumors, blood born tumors such as leukemias, tumor metastasis, Kaposi's sarcoma, benign tumors, for example hemangiomas, acoustic neuromas, neurofibromas, trachomas, and pyogenic granulomas, rheumatoid arthritis, psoriasis, ocular angiogenic diseases, for example, diabetic retinopathy, retinopathy of prematurity, macular degeneration, corneal graft rejection, neovascular glaucoma, retrolental fibroplasia, rubeosis, retinoblastoma, and uvietis, delayed wound healing, endometriosis, vascluogenesis, granulations, hypertrophic scars (keloids), nonunion fractures, scleroderma, trachoma, vascular adhesions, myocardial angiogenesis, coronary collaterals, cerebral collaterals, arteriovenous malformations, ischemic limb angiogenesis, Osler-Webber Syndrome, plaque neovascularization, telangiectasia, hemophiliac joints, angiofibroma fibromuscular dysplasia, wound granulation, Crohn's disease, atherosclerosis, birth control agent by preventing vascularization required for embryo implantation controlling menstruation, diseases that have angiogenesis as a pathologic consequence such as cat scratch disease (Rochele minalia quintosa), ulcers (Helicobacter pylori), Bartonellosis and bacillary angiomatosis.

[0842] In one aspect of the birth control method, an amount of the compound sufficient to block embryo implantation is administered before or after intercourse and fertilization have occurred, thus providing an effective method of birth control, possibly a “morning after” method. Polynucleotides, polypeptides, agonists and/or agonists may also be used in controlling menstruation or administered as either a peritoneal lavage fluid or for peritoneal implantation in the treatment of endometriosis.

[0843] Polynucleotides, polypeptides, agonists and/or agonists of the present invention may be incorporated into surgical sutures in order to prevent stitch granulomas.

[0844] Polynucleotides, polypeptides, agonists and/or agonists may be utilized in a wide variety of surgical procedures. For example, within one aspect of the present invention a compositions (in the form of, for example, a spray or film) may be utilized to coat or spray an area prior to removal of a tumor, in order to isolate normal surrounding tissues from malignant tissue, and/or to prevent the spread of disease to surrounding tissues. Within other aspects of the present invention, compositions (e.g., in the form of a spray) may be delivered via endoscopic procedures in order to coat tumors, or inhibit angiogenesis in a desired locale. Within yet other aspects of the present invention, surgical meshes which have been coated with anti- angiogenic compositions of the present invention may be utilized in any procedure wherein a surgical mesh might be utilized. For example, within one embodiment of the invention a surgical mesh laden with an anti-angiogenic composition may be utilized during abdominal cancer resection surgery (e.g., subsequent to colon resection) in order to provide support to the structure, and to release an amount of the anti-angiogenic factor.

[0845] Within further aspects of the present invention, methods are provided for treating tumor excision sites, comprising administering a polynucleotide, polypeptide, agonist and/or agonist to the resection margins of a tumor subsequent to excision, such that the local recurrence of cancer and the formation of new blood vessels at the site is inhibited. Within one embodiment of the invention, the anti-angiogenic compound is administered directly to the tumor excision site (e.g., applied by swabbing, brushing or otherwise coating the resection margins of the tumor with the anti-angiogenic compound). Alternatively, the anti-angiogenic compounds may be incorporated into known surgical pastes prior to administration. Within particularly preferred embodiments of the invention, the anti-angiogenic compounds are applied after hepatic resections for malignancy, and after neurosurgical operations.

[0846] Within one aspect of the present invention, polynucleotides, polypeptides, agonists and/or agonists may be administered to the resection margin of a wide variety of tumors, including for example, breast, colon, brain and hepatic tumors. For example, within one embodiment of the invention, anti-angiogenic compounds may be administered to the site of a neurological tumor subsequent to excision, such that the formation of new blood vessels at the site are inhibited.

[0847] The polynucleotides, polypeptides, agonists and/or agonists of the present invention may also be administered along with other anti-angiogenic factors. Representative examples of other anti-angiogenic factors include: Anti-Invasive Factor, retinoic acid and derivatives thereof, paclitaxel, Suramin, Tissue Inhibitor of Metalloproteinase-1, Tissue Inhibitor of Metalloproteinase-2, Plasminogen Activator Inhibitor-1, Plasminogen Activator Inhibitor-2, and various forms of the lighter “d group” transition metals.

[0848] Lighter “d group” transition metals include, for example, vanadium, molybdenum, tungsten, titanium, niobium, and tantalum species. Such transition metal species may form transition metal complexes. Suitable complexes of the above-mentioned transition metal species include oxo transition metal complexes.

[0849] Representative examples of vanadium complexes include oxo vanadium complexes such as vanadate and vanadyl complexes. Suitable vanadate complexes include metavanadate and orthovanadate complexes such as, for example, ammonium metavanadate, sodium metavanadate, and sodium orthovanadate. Suitable vanadyl complexes include, for example, vanadyl acetylacetonate and vanadyl sulfate including vanadyl sulfate hydrates such as vanadyl sulfate mono- and trihydrates.

[0850] Representative examples of tungsten and molybdenum complexes also include oxo complexes. Suitable oxo tungsten complexes include tungstate and tungsten oxide complexes. Suitable tungstate complexes include ammonium tungstate, calcium tungstate, sodium tungstate dihydrate, and tungstic acid. Suitable tungsten oxides include tungsten (IV) oxide and tungsten (VI) oxide. Suitable oxo molybdenum complexes include molybdate, molybdenum oxide, and molybdenyl complexes. Suitable molybdate complexes include ammonium molybdate and its hydrates, sodium molybdate and its hydrates, and potassium molybdate and its hydrates. Suitable molybdenum oxides include molybdenum (VI) oxide, molybdenum (VI) oxide, and molybdic acid. Suitable molybdenyl complexes include, for example, molybdenyl acetylacetonate. Other suitable tungsten and molybdenum complexes include hydroxo derivatives derived from, for example, glycerol, tartaric acid, and sugars.

[0851] A wide variety of other anti-angiogenic factors may also be utilized within the context of the present invention. Representative examples include platelet factor 4; protamine sulphate; sulphated chitin derivatives (prepared from queen crab shells), (Murata et al., Cancer Res. 51:22-26, 1991); Sulphated Polysaccharide Peptidoglycan Complex (SP- PG) (the function of this compound may be enhanced by the presence of steroids such as estrogen, and tamoxifen citrate); Staurosporine; modulators of matrix metabolism, including for example, proline analogs, cishydroxyproline, d,L-3,4-dehydroproline, Thiaproline, alpha,alpha-dipyridyl, aminopropionitrile fumarate; 4-propyl-5-(4-pyridinyl)-2(3H)-oxazolone; Methotrexate; Mitoxantrone; Heparin; Interferons; 2 Macroglobulin-serum; ChIMP-3 (Pavloff et al., J. Bio. Chem. 267:17321-17326, 1992); Chymostatin (Tomkinson et al., Biochem J. 286:475-480, 1992); Cyclodextrin Tetradecasulfate; Eponemycin; Camptothecin; Fumagillin (Ingber et al., Nature 348:555-557, 1990); Gold Sodium Thiomalate (“GST” ;

[0852] Matsubara and Ziff, J. Clin. Invest. 79:1440-1446, 1987); anticollagenase-serum;

[0853] alpha2-antiplasmin (Holmes et al., J. Biol. Chem.. 262(4): 1659-1664, 1987);

[0854] Bisantrene (National Cancer Institute); Lobenzarit disodium (N-(2)-carboxyphenyl-4-chloroanthronilic acid disodium or “CCA” ; Takeuchi et al., Agents Actions 36:312-316, 1992); Thalidomide; Angostatic steroid; AGM-1470; carboxynaminolmidazole; and metalloproteinase inhibitors such as BB94.

[0855] Diseases at the Cellular Level

[0856] Diseases associated with increased cell survival or the inhibition of apoptosis that could be treated, prevented, and/or diagnosed by the polynucleotides or polypeptides and/or antagonists or agonists of the invention, include cancers (such as follicular lymphomas, carcinomas with p53 mutations, and hormone-dependent tumors, including, but not limited to colon cancer, cardiac tumors, pancreatic cancer, melanoma, retinoblastoma, glioblastoma, lung cancer, intestinal cancer, testicular cancer, stomach cancer, neuroblastoma, myxoma, myoma, lymphoma, endothelioma, osteoblastoma, osteoclastoma, osteosarcoma, chondrosarcoma, adenoma, breast cancer, prostate cancer, Kaposi's sarcoma and ovarian cancer); autoimmune diseases, disorders, and/or conditions (such as, multiple sclerosis, Sjogren's syndrome, Hashimoto's thyroiditis, biliary cirrhosis, Behcet's disease, Crohn's disease, polymyositis, systemic lupus erythematosus and immune-related glomerulonephritis and rheumatoid arthritis) and viral infections (such as herpes viruses, pox viruses and adenoviruses), inflammation, graft v. host disease, acute graft rejection, and chronic graft rejection. In preferred embodiments, the polynucleotides or polypeptides, and/or agonists or antagonists of the invention are used to inhibit growth, progression, and/or metastasis of cancers, in particular those listed above.

[0857] Additional diseases or conditions associated with increased cell survival that could be treated, prevented or diagnosed by the polynucleotides or polypeptides, or agonists or antagonists of the invention, include, but are not limited to, progression, and/or metastases of malignancies and related disorders such as leukemia (including acute leukemias (e.g., acute lymphocytic leukemia, acute myelocytic leukemia (including myeloblastic, promyelocytic, myelomonocytic, monocytic, and erythroleukemia)) and chronic leukemias (e.g., chronic myelocytic (granulocytic) leukemia and chronic lymphocytic leukemia)), polycythemia vera, lymphomas (e.g., Hodgkin's disease and non-Hodgkin's disease), multiple myeloma, Waldenstrom's macroglobulinemia, heavy chain disease, and solid tumors including, but not limited to, sarcomas and carcinomas such as fibrosarcoma, myxosarcoma, liposarcoma, chondrosarcoma, osteogenic sarcoma, chordoma, angiosarcoma, endotheliosarcoma, lymphangiosarcoma, lymphangioendotheliosarcoma, synovioma, mesothelioma, Ewing's tumor, leiomyosarcoma, rhabdomyosarcoma, colon carcinoma, pancreatic cancer, breast cancer, ovarian cancer, prostate cancer, squamous cell carcinoma, basal cell carcinoma, adenocarcinoma, sweat gland carcinoma, sebaceous gland carcinoma, papillary carcinoma, papillary adenocarcinomas, cystadenocarcinoma, medullary carcinoma, bronchogenic carcinoma, renal cell carcinoma, hepatoma, bile duct carcinoma, choriocarcinoma, seminoma, embryonal carcinoma, Wilm's tumor, cervical cancer, testicular tumor, lung carcinoma, small cell lung carcinoma, bladder carcinoma, epithelial carcinoma, glioma, astrocytoma, medulloblastoma, craniopharyngioma, ependymoma, pinealoma, hemangioblastoma, acoustic neuroma, oligodendroglioma, menangioma, melanoma, neuroblastoma, and retinoblastoma.

[0858] Diseases associated with increased apoptosis that could be treated, prevented, and/or diagnosed by the polynucleotides or polypeptides, and/or agonists or antagonists of the invention, include AIDS; neurodegenerative diseases, disorders, and/or conditions (such as Alzheimer's disease, Parkinson's disease, Amyotrophic lateral sclerosis, Retinitis pigmentosa, Cerebellar degeneration and brain tumor or prior associated disease); autoimmune diseases, disorders, and/or conditions (such as, multiple sclerosis, Sjogren's syndrome, Hashimoto's thyroiditis, biliary cirrhosis, Behcet's disease, Crohn's disease, polymyositis, systemic lupus erythematosus and immune-related glomerulonephritis and rheumatoid arthritis) myelodysplastic syndromes (such as aplastic anemia), graft v. host disease, ischemic injury (such as that caused by myocardial infarction, stroke and reperfusion injury), liver injury (e.g., hepatitis related liver injury, ischemia/reperfusion injury, cholestosis (bile duct injury) and liver cancer); toxin-induced liver disease (such as that caused by alcohol), septic shock, cachexia and anorexia.

[0859] Wound Healing and Epithelial Cell Proliferation

[0860] In accordance with yet a further aspect of the present invention, there is provided a process for utilizing the polynucleotides or polypeptides, and/or agonists or antagonists of the invention, for therapeutic purposes, for example, to stimulate epithelial cell proliferation and basal keratinocytes for the purpose of wound healing, and to stimulate hair follicle production and healing of dermal wounds. Polynucleotides or polypeptides, as well as agonists or antagonists of the invention, may be clinically useful in stimulating wound healing including surgical wounds, excisional wounds, deep wounds involving damage of the dermis and epidermis, eye tissue wounds, dental tissue wounds, oral cavity wounds, diabetic ulcers, dermal ulcers, cubitus ulcers, arterial ulcers, venous stasis ulcers, burns resulting from heat exposure or chemicals, and other abnormal wound healing conditions such as uremia, malnutrition, vitamin deficiencies and complications associated with systemic treatment with steroids, radiation therapy and antineoplastic drugs and antimetabolites. Polynucleotides or polypeptides, and/or agonists or antagonists of the invention, could be used to promote dermal reestablishment subsequent to dermal loss

[0861] The polynucleotides or polypeptides, and/or agonists or antagonists of the invention, could be used to increase the adherence of skin grafts to a wound bed and to stimulate re-epithelialization from the wound bed. The following are a non-exhaustive list of grafts that polynucleotides or polypeptides, agonists or antagonists of the invention, could be used to increase adherence to a wound bed: autografts, artificial skin, allografts, autodermic graft, autoepidermic grafts, avacular grafts, Blair-Brown grafts, bone graft, brephoplastic grafts, cutis graft, delayed graft, dermic graft, epidermic graft, fascia graft, full thickness graft, heterologous graft, xenograft, homologous graft, hyperplastic graft, lamellar graft, mesh graft, mucosal graft, Ollier-Thiersch graft, omenpal graft, patch graft, pedicle graft, penetrating graft, split skin graft, thick split graft. The polynucleotides or polypeptides, and/or agonists or antagonists of the invention, can be used to promote skin strength and to improve the appearance of aged skin.

[0862] It is believed that the polynucleotides or polypeptides, and/or agonists or antagonists of the invention, will also produce changes in hepatocyte proliferation, and epithelial cell proliferation in the lung, breast, pancreas, stomach, small intestine, and large intestine. The polynucleotides or polypeptides, and/or agonists or antagonists of the invention, could promote proliferation of epithelial cells such as sebocytes, hair follicles, hepatocytes, type II pneumocytes, mucin-producing goblet cells, and other epithelial cells and their progenitors contained within the skin, lung, liver, and gastrointestinal tract. The polynucleotides or polypeptides, and/or agonists or antagonists of the invention, may promote proliferation of endothelial cells, keratinocytes, and basal keratinocytes.

[0863] The polynucleotides or polypeptides, and/or agonists or antagonists of the invention, could also be used to reduce the side effects of gut toxicity that result from radiation, chemotherapy treatments or viral infections. The polynucleotides or polypeptides, and/or agonists or antagonists of the invention, may have a cytoprotective effect on the small intestine mucosa. The polynucleotides or polypeptides, and/or agonists or antagonists of the invention, may also stimulate healing of mucositis (mouth ulcers) that result from chemotherapy and viral infections.

[0864] The polynucleotides or polypeptides, and/or agonists or antagonists of the invention, could further be used in full regeneration of skin in full and partial thickness skin defects, including bums, (i.e., repopulation of hair follicles, sweat glands, and sebaceous glands), treatment of other skin defects such as psoriasis. The polynucleotides or polypeptides, and/or agonists or antagonists of the invention, could be used to treat epidermolysis bullosa, a defect in adherence of the epidermis to the underlying dermis which results in frequent, open and painful blisters by accelerating reepithelialization of these lesions. The polynucleotides or polypeptides, and/or agonists or antagonists of the invention, could also be used to treat gastric and doudenal ulcers and help heal by scar formation of the mucosal lining and regeneration of glandular mucosa and duodenal mucosal lining more rapidly. Inflamamatory bowel diseases, such as Crohn's disease and ulcerative colitis, are diseases which result in destruction of the mucosal surface of the small or large intestine, respectively. Thus, the polynucleotides or polypeptides, and/or agonists or antagonists of the invention, could be used to promote the resurfacing of the mucosal surface to aid more rapid healing and to prevent progression of inflammatory bowel disease. Treatment with the polynucleotides or polypeptides, and/or agonists or antagonists of the invention, is expected to have a significant effect on the production of mucus throughout the gastrointestinal tract and could be used to protect the intestinal mucosa from injurious substances that are ingested or following surgery. The polynucleotides or polypeptides, and/or agonists or antagonists of the invention, could be used to treat diseases associate with the under expression of the polynucleotides of the invention.

[0865] Moreover, the polynucleotides or polypeptides, and/or agonists or antagonists of the invention, could be used to prevent and heal damage to the lungs due to various pathological states. A growth factor such as the polynucleotides or polypeptides, and/or agonists or antagonists of the invention, which could stimulate proliferation and differentiation and promote the repair of alveoli and brochiolar epithelium to prevent or treat acute or chronic lung damage. For example, emphysema, which results in the progressive loss of aveoli, and inhalation injuries, i.e., resulting from smoke inhalation and bums, that cause necrosis of the bronchiolar epithelium and alveoli could be effectively treated, prevented, and/or diagnosed using the polynucleotides or polypeptides, and/or agonists or antagonists of the invention. Also, the polynucleotides or polypeptides, and/or agonists or antagonists of the invention, could be used to stimulate the proliferation of and differentiation of type II pneumocytes, which may help treat or prevent disease such as hyaline membrane diseases, such as infant respiratory distress syndrome and bronchopulmonary displasia, in premature infants.

[0866] The polynucleotides or polypeptides, and/or agonists or antagonists of the invention, could stimulate the proliferation and differentiation of hepatocytes and, thus, could be used to alleviate or treat liver diseases and pathologies such as fulminant liver failure caused by cirrhosis, liver damage caused by viral hepatitis and toxic substances (i.e., acetaminophen, carbon tetraholoride and other hepatotoxins known in the art).

[0867] In addition, the polynucleotides or polypeptides, and/or agonists or antagonists of the invention, could be used treat or prevent the onset of diabetes mellitus. In patients with newly diagnosed Types I and II diabetes, where some islet cell function remains, the polynucleotides or polypeptides, and/or agonists or antagonists of the invention, could be used to maintain the islet function so as to alleviate, delay or prevent permanent manifestation of the disease. Also, the polynucleotides or polypeptides, and/or agonists or antagonists of the invention, could be used as an auxiliary in islet cell transplantation to improve or promote islet cell function.

[0868] Neurological Diseases

[0869] Nervous system diseases, disorders, and/or conditions, which can be treated, prevented, and/or diagnosed with the compositions of the invention (e.g., polypeptides, polynucleotides, and/or agonists or antagonists), include, but are not limited to, nervous system injuries, and diseases, disorders, and/or conditions which result in either a disconnection of axons, a diminution or degeneration of neurons, or demyelination. Nervous system lesions which may be treated, prevented, and/or diagnosed in a patient (including human and non-human mammalian patients) according to the invention, include but are not limited to, the following lesions of either the central (including spinal cord, brain) or peripheral nervous systems: (1) ischemic lesions, in which a lack of oxygen in a portion of the nervous system results in neuronal injury or death, including cerebral infarction or ischemia, or spinal cord infarction or ischemia; (2) traumatic lesions, including lesions caused by physical injury or associated with surgery, for example, lesions which sever a portion of the nervous system, or compression injuries; (3) malignant lesions, in which a portion of the nervous system is destroyed or injured by malignant tissue which is either a nervous system associated malignancy or a malignancy derived from non-nervous system tissue; (4) infectious lesions, in which a portion of the nervous system is destroyed or injured as a result of infection, for example, by an abscess or associated with infection by human immunodeficiency virus, herpes zoster, or herpes simplex virus or with Lyme disease, tuberculosis, syphilis; (5) degenerative lesions, in which a portion of the nervous system is destroyed or injured as a result of a degenerative process including but not limited to degeneration associated with Parkinson's disease, Alzheimer's disease, Huntington's chorea, or amyotrophic lateral sclerosis (ALS); (6) lesions associated with nutritional diseases, disorders, and/or conditions, in which a portion of the nervous system is destroyed or injured by a nutritional disorder or disorder of metabolism including but not limited to, vitamin B12 deficiency, folic acid deficiency, Wernicke disease, tobacco-alcohol amblyopia, Marchiafava-Bignami disease (primary degeneration of the corpus callosum), and alcoholic cerebellar degeneration; (7) neurological lesions associated with systemic diseases including, but not limited to, diabetes (diabetic neuropathy, Bell's palsy), systemic lupus erythematosus, carcinoma, or sarcoidosis; (8) lesions caused by toxic substances including alcohol, lead, or particular neurotoxins; and (9) demyelinated lesions in which a portion of the nervous system is destroyed or injured by a demyelinating disease including, but not limited to, multiple sclerosis, human immunodeficiency virus-associated myelopathy, transverse myelopathy or various etiologies, progressive multifocal leukoencephalopathy, and central pontine myelinolysis.

[0870] In a preferred embodiment, the polypeptides, polynucleotides, or agonists or antagonists of the invention are used to protect neural cells from the damaging effects of cerebral hypoxia. According to this embodiment, the compositions of the invention are used to treat, prevent, and/or diagnose neural cell injury associated with cerebral hypoxia. In one aspect of this embodiment, the polypeptides, polynucleotides, or agonists or antagonists of the invention are used to treat, prevent, and/or diagnose neural cell injury associated with cerebral ischemia. In another aspect of this embodiment, the polypeptides, polynucleotides, or agonists or antagonists of the invention are used to treat, prevent, and/or diagnose neural cell injury associated with cerebral infarction. In another aspect of this embodiment, the polypeptides, polynucleotides, or agonists or antagonists of the invention are used to treat, prevent, and/or diagnose or prevent neural cell injury associated with a stroke. In a further aspect of this embodiment, the polypeptides, polynucleotides, or agonists or antagonists of the invention are used to treat, prevent, and/or diagnose neural cell injury associated with a heart attack.

[0871] The compositions of the invention which are useful for treating or preventing a nervous system disorder may be selected by testing for biological activity in promoting the survival or differentiation of neurons. For example, and not by way of limitation, compositions of the invention which elicit any of the following effects may be useful according to the invention: (1) increased survival time of neurons in culture; (2) increased sprouting of neurons in culture or in vivo; (3) increased production of a neuron-associated molecule in culture or in vivo, e.g., choline acetyltransferase or acetylcholinesterase with respect to motor neurons; or (4) decreased symptoms of neuron dysfunction in vivo. Such effects may be measured by any method known in the art. In preferred, non-limiting embodiments, increased survival of neurons may routinely be measured using a method set forth herein or otherwise known in the art, such as, for example, the method set forth in Arakawa et al. (J. Neurosci. 10:3507-3515 (1990)); increased sprouting of neurons may be detected by methods known in the art, such as, for example, the methods set forth in Pestronk et al. (Exp. Neurol. 70:65-82 (1980)) or Brown et al. (Ann. Rev. Neurosci. 4:17-42 (1981)); increased production of neuron-associated molecules may be measured by bioassay, enzymatic assay, antibody binding, Northern blot assay, etc., using techniques known in the art and depending on the molecule to be measured; and motor neuron dysfunction may be measured by assessing the physical manifestation of motor neuron disorder, e.g., weakness, motor neuron conduction velocity, or functional disability.

[0872] In specific embodiments, motor neuron diseases, disorders, and/or conditions that may be treated, prevented, and/or diagnosed according to the invention include, but are not limited to, diseases, disorders, and/or conditions such as infarction, infection, exposure to toxin, trauma, surgical damage, degenerative disease or malignancy that may affect motor neurons as well as other components of the nervous system, as well as diseases, disorders, and/or conditions that selectively affect neurons such as amyotrophic lateral sclerosis, and including, but not limited to, progressive spinal muscular atrophy, progressive bulbar palsy, primary lateral sclerosis, infantile and juvenile muscular atrophy, progressive bulbar paralysis of childhood (Fazio-Londe syndrome), poliomyelitis and the post polio syndrome, and Hereditary Motorsensory Neuropathy (Charcot-Marie-Tooth Disease).

[0873] Infectious Disease

[0874] A polypeptide or polynucleotide and/or agonist or antagonist of the present invention can be used to treat, prevent, and/or diagnose infectious agents. For example, by increasing the immune response, particularly increasing the proliferation and differentiation of B and/or T cells, infectious diseases may be treated, prevented, and/or diagnosed. The immune response may be increased by either enhancing an existing immune response, or by initiating a new immune response. Alternatively, polypeptide or polynucleotide and/or agonist or antagonist of the present invention may also directly inhibit the infectious agent, without necessarily eliciting an immune response.

[0875] Viruses are one example of an infectious agent that can cause disease or symptoms that can be treated, prevented, and/or diagnosed by a polynucleotide or polypeptide and/or agonist or antagonist of the present invention. Examples of viruses, include, but are not limited to Examples of viruses, include, but are not limited to the following DNA and RNA viruses and viral families: Arbovirus, Adenoviridae, Arenaviridae, Arterivirus, Bimaviridae, Bunyaviridae, Caliciviridae, Circoviridae, Coronaviridae, Dengue, EBV, HIV, Flaviviridae, Hepadnaviridae (Hepatitis), Herpesviridae (such as, Cytomegalovirus, Herpes Simplex, Herpes Zoster), Mononegavirus (e.g., Paramyxoviridae, Morbillivirus, Rhabdoviridae), Orthomyxoviridae (e.g., Influenza A, Influenza B, and parainfluenza), Papiloma virus, Papovaviridae, Parvoviridae, Picomaviridae, Poxviridae (such as Smallpox or Vaccinia), Reoviridae (e.g., Rotavirus), Retroviridae (HTLV-I, HTLV-IL, Lentivirus), and Togaviridae (e.g., Rubivirus). Viruses falling within these families can cause a variety of diseases or symptoms, including, but not limited to: arthritis, bronchiollitis, respiratory syncytial virus, encephalitis, eye infections (e.g., conjunctivitis, keratitis), chronic fatigue syndrome, hepatitis (A, B, C, E, Chronic Active, Delta), Japanese B encephalitis, Junin, Chikungunya, Rift Valley fever, yellow fever, meningitis, opportunistic infections (e.g., AIDS), pneumonia, Burkitt's Lymphoma, chickenpox, hemorrhagic fever, Measles, Mumps, Parainfluenza, Rabies, the common cold, Polio, leukemia, Rubella, sexually transmitted diseases, skin diseases (e.g., Kaposi's, warts), and viremia. polynucleotides or polypeptides, or agonists or antagonists of the invention, can be used to treat, prevent, and/or diagnose any of these symptoms or diseases. In specific embodiments, polynucleotides, polypeptides, or agonists or antagonists of the invention are used to treat, prevent, and/or diagnose: meningitis, Dengue, EBV, and/or hepatitis (e.g., hepatitis B). In an additional specific embodiment polynucleotides, polypeptides, or agonists or antagonists of the invention are used to treat patients nonresponsive to one or more other commercially available hepatitis vaccines. In a further specific embodiment polynucleotides, polypeptides, or agonists or antagonists of the invention are used to treat, prevent, and/or diagnose AIDS.

[0876] Similarly, bacterial or fungal agents that can cause disease or symptoms and that can be treated, prevented, and/or diagnosed by a polynucleotide or polypeptide and/or agonist or antagonist of the present invention include, but not limited to, include, but not limited to, the following Gram-Negative and Gram-positive bacteria and bacterial families and fungi: Actinomycetales (e.g., Corynebacterium, Mycobacterium, Norcardia), Cryptococcus neoformans, Aspergillosis, Bacillaceae (e.g., Anthrax, Clostridium), Bacteroidaceae, Blastomycosis, Bordetella, Borrelia (e.g., Borrelia burgdorferi), Brucellosis, Candidiasis, Campylobacter, Coccidioidomycosis, Cryptococcosis, Dermatocycoses, E. coli (e.g., Enterotoxigenic E. coli and Enterohemorrhagic E. coli), Enterobacteriaceae (Klebsiella, Salmonella (e.g., Salmonella typhi, and Salmonella paratyphi), Serratia, Yersinia), Erysipelothrix, Helicobacter, Legionellosis, Leptospirosis, Listeria, Mycoplasmatales, Mycobacterium leprae, Vibrio cholerae, Neisseriaceae (e.g., Acinetobacter, Gonorrhea, Menigococcal), Meisseria meningitidis, Pasteurellacea Infections (e.g., Actinobacillus, Heamophilus (e.g., Heamophilus influenza type B), Pasteurella), Pseudomonas, Rickettsiaceae, Chlamydiaceae, Syphilis, Shigella spp., Staphylococcal, Meningiococcal, Pneumococcal and Streptococcal (e.g., Streptococcus pneumoniae and Group B Streptococcus). These bacterial or fungal families can cause the following diseases or symptoms, including, but not limited to: bacteremia, endocarditis, eye infections (conjunctivitis, tuberculosis, uveitis), gingivitis, opportunistic infections (e.g., AIDS related infections), paronychia, prosthesis-related infections, Reiter's Disease, respiratory tract infections, such as Whooping Cough or Empyema, sepsis, Lyme Disease, Cat-Scratch Disease, Dysentery, Paratyphoid Fever, food poisoning, Typhoid, pneumonia, Gonorrhea, meningitis (e.g., mengitis types A and B), Chlamydia, Syphilis, Diphtheria, Leprosy, Paratuberculosis, Tuberculosis, Lupus, Botulism, gangrene, tetanus, impetigo, Rheumatic Fever, Scarlet Fever, sexually transmitted diseases, skin diseases (e.g., cellulitis, dermatocycoses), toxemia, urinary tract infections, wound infections. Polynucleotides or polypeptides, agonists or antagonists of the invention, can be used to treat, prevent, and/or diagnose any of these symptoms or diseases. In specific embodiments, polynucleotides, polypeptides, agonists or antagonists of the invention are used to treat, prevent, and/or diagnose: tetanus, Diptheria, botulism, and/or meningitis type B.

[0877] Moreover, parasitic agents causing disease or symptoms that can be treated, prevented, and/or diagnosed by a polynucleotide or polypeptide and/or agonist or antagonist of the present invention include, but not limited to, the following families or class: Amebiasis, Babesiosis, Coccidiosis, Cryptosporidiosis, Dientamoebiasis, Dourine, Ectoparasitic, Giardiasis, Helminthiasis, Leishmaniasis, Theileriasis, Toxoplasmosis, Trypanosomiasis, and Trichomonas and Sporozoans (e.g., Plasmodium virax, Plasmodium falciparium, Plasmodium malariae and Plasmodium ovale). These parasites can cause a variety of diseases or symptoms, including, but not limited to: Scabies, Trombiculiasis, eye infections, intestinal disease (e.g., dysentery, giardiasis), liver disease, lung disease, opportunistic infections (e.g., AIDS related), malaria, pregnancy complications, and toxoplasmosis. polynucleotides or polypeptides, or agonists or antagonists of the invention, can be used to treat, prevent, and/or diagnose any of these symptoms or diseases. In specific embodiments, polynucleotides, polypeptides, or agonists or antagonists of the invention are used to treat, prevent, and/or diagnose malaria.

[0878] Preferably, treatment or prevention using a polypeptide or polynucleotide and/or agonist or antagonist of the present invention could either be by administering an effective amount of a polypeptide to the patient, or by removing cells from the patient, supplying the cells with a polynucleotide of the present invention, and returning the engineered cells to the patient (ex vivo therapy). Moreover, the polypeptide or polynucleotide of the present invention can be used as an antigen in a vaccine to raise an immune response against infectious disease.

[0879] Regeneration

[0880] A polynucleotide or polypeptide and/or agonist or antagonist of the present invention can be used to differentiate, proliferate, and attract cells, leading to the regeneration of tissues. (See, Science 276:59-87 (1997).) The regeneration of tissues could be used to repair, replace, or protect tissue damaged by congenital defects, trauma (wounds, burns, incisions, or ulcers), age, disease (e.g. osteoporosis, osteocarthritis, periodontal disease, liver failure), surgery, including cosmetic plastic surgery, fibrosis, reperfusion injury, or systemic cytokine damage.

[0881] Tissues that could be regenerated using the present invention include organs (e.g., pancreas, liver, intestine, kidney, skin, endothelium), muscle (smooth, skeletal or cardiac), vasculature (including vascular and lymphatics), nervous, hematopoietic, and skeletal (bone, cartilage, tendon, and ligament) tissue. Preferably, regeneration occurs without or decreased scarring. Regeneration also may include angiogenesis.

[0882] Moreover, a polynucleotide or polypeptide and/or agonist or antagonist of the present invention may increase regeneration of tissues difficult to heal. For example, increased tendon/ligament regeneration would quicken recovery time after damage. A polynucleotide or polypeptide and/or agonist or antagonist of the present invention could also be used prophylactically in an effort to avoid damage. Specific diseases that could be treated, prevented, and/or diagnosed include of tendinitis, carpal tunnel syndrome, and other tendon or ligament defects. A further example of tissue regeneration of non-healing wounds includes pressure ulcers, ulcers associated with vascular insufficiency, surgical, and traumatic wounds.

[0883] Similarly, nerve and brain tissue could also be regenerated by using a polynucleotide or polypeptide and/or agonist or antagonist of the present invention to proliferate and differentiate nerve cells. Diseases that could be treated, prevented, and/or diagnosed using this method include central and peripheral nervous system diseases, neuropathies, or mechanical and traumatic diseases, disorders, and/or conditions (e.g., spinal cord disorders, head trauma, cerebrovascular disease, and stoke). Specifically, diseases associated with peripheral nerve injuries, peripheral neuropathy (e.g., resulting from chemotherapy or other medical therapies), localized neuropathies, and central nervous system diseases (e.g., Alzheimer's disease, Parkinson's disease, Huntington's disease, amyotrophic lateral sclerosis, and Shy-Drager syndrome), could all be treated, prevented, and/or diagnosed using the polynucleotide or polypeptide and/or agonist or antagonist of the present invention.

[0884] Chemotaxis

[0885] A polynucleotide or polypeptide and/or agonist or antagonist of the present invention may have chemotaxis activity. A chemotaxic molecule attracts or mobilizes cells (e.g., monocytes, fibroblasts, neutrophils, T-cells, mast cells, eosinophils, epithelial and/or endothelial cells) to a particular site in the body, such as inflammation, infection, or site of hyperproliferation. The mobilized cells can then fight off and/or heal the particular trauma or abnormality.

[0886] A polynucleotide or polypeptide and/or agonist or antagonist of the present invention may increase chemotaxic activity of particular cells. These chemotactic molecules can then be used to treat, prevent, and/or diagnose inflammation, infection, hyperproliferative diseases, disorders, and/or conditions, or any immune system disorder by increasing the number of cells targeted to a particular location in the body. For example, chemotaxic molecules can be used to treat, prevent, and/or diagnose wounds and other trauma to tissues by attracting immune cells to the injured location. Chemotactic molecules of the present invention can also attract fibroblasts, which can be used to treat, prevent, and/or diagnose wounds.

[0887] It is also contemplated that a polynucleotide or polypeptide and/or agonist or antagonist of the present invention may inhibit chemotactic activity. These molecules could also be used to treat, prevent, and/or diagnose diseases, disorders, and/or conditions. Thus, a polynucleotide or polypeptide and/or agonist or antagonist of the present invention could be used as an inhibitor of chemotaxis.

[0888] Binding Activity

[0889] A polypeptide of the present invention may be used to screen for molecules that bind to the polypeptide or for molecules to which the polypeptide binds. The binding of the polypeptide and the molecule may activate (agonist), increase, inhibit (antagonist), or decrease activity of the polypeptide or the molecule bound. Examples of such molecules include antibodies, oligonucleotides, proteins (e.g., receptors),or small molecules.

[0890] Preferably, the molecule is closely related to the natural ligand of the polypeptide, e.g., a fragment of the ligand, or a natural substrate, a ligand, a structural or functional mimetic. (See, Coligan et al., Current Protocols in Immunology 1(2):Chapter 5 (1991).) Similarly, the molecule can be closely related to the natural receptor to which the polypeptide binds, or at least, a fragment of the receptor capable of being bound by the polypeptide (e.g., active site). In either case, the molecule can be rationally designed using known techniques.

[0891] Preferably, the screening for these molecules involves producing appropriate cells which express the polypeptide, either as a secreted protein or on the cell membrane. Preferred cells include cells from mammals, yeast, Drosophila, or E. coli. Cells expressing the polypeptide (or cell membrane containing the expressed polypeptide) are then preferably contacted with a test compound potentially containing the molecule to observe binding, stimulation, or inhibition of activity of either the polypeptide or the molecule.

[0892] The assay may simply test binding of a candidate compound to the polypeptide, wherein binding is detected by a label, or in an assay involving competition with a labeled competitor. Further, the assay may test whether the candidate compound results in a signal generated by binding to the polypeptide.

[0893] Alternatively, the assay can be carried out using cell-free preparations, polypeptide/molecule affixed to a solid support, chemical libraries, or natural product mixtures. The assay may also simply comprise the steps of mixing a candidate compound with a solution containing a polypeptide, measuring polypeptide/molecule activity or binding, and comparing the polypeptide/molecule activity or binding to a standard.

[0894] Preferably, an ELISA assay can measure polypeptide level or activity in a sample (e.g., biological sample) using a monoclonal or polyclonal antibody. The antibody can measure polypeptide level or activity by either binding, directly or indirectly, to the polypeptide or by competing with the polypeptide for a substrate.

[0895] Additionally, the receptor to which a polypeptide of the invention binds can be identified by numerous methods known to those of skill in the art, for example, ligand panning and FACS sorting (Coligan, et al., Current Protocols in Immun., 1(2), Chapter 5, (1991)). For example, expression cloning is employed wherein polyadenylated RNA is prepared from a cell responsive to the polypeptides, for example, NIH3T3 cells which are known to contain multiple receptors for the FGF family proteins, and SC-3 cells, and a cDNA library created from this RNA is divided into pools and used to transfect COS cells or other cells that are not responsive to the polypeptides. Transfected cells which are grown on glass slides are exposed to the polypeptide of the present invention, after they have been labeled. The polypeptides can be labeled by a variety of means including iodination or inclusion of a recognition site for a site-specific protein kinase.

[0896] Following fixation and incubation, the slides are subjected to auto-radiographic analysis. Positive pools are identified and sub-pools are prepared and re-transfected using an iterative sub-pooling and re-screening process, eventually yielding a single clones that encodes the putative receptor.

[0897] As an alternative approach for receptor identification, the labeled polypeptides can be photoaffinity linked with cell membrane or extract preparations that express the receptor molecule. Cross-linked material is resolved by PAGE analysis and exposed to X-ray film. The labeled complex containing the receptors of the polypeptides can be excised, resolved into peptide fragments, and subjected to protein microsequencing. The amino acid sequence obtained from microsequencing would be used to design a set of degenerate oligonucleotide probes to screen a cDNA library to identify the genes encoding the putative receptors.

[0898] Moreover, the techniques of gene-shuffling, motif-shuffling, exon-shuffling, and/or codon-shuffling (collectively referred to as “DNA shuffling”) may be employed to modulate the activities of polypeptides of the invention thereby effectively generating agonists and antagonists of polypeptides of the invention. See generally, U.S. Pat. Nos. 5,605,793, 5,811,238, 5,830,721, 5,834,252, and 5,837,458, and Patten, P. A., et al., Curr. Opinion Biotechnol. 8:724-33 (1997); Harayama, S. Trends Biotechnol. 16(2):76-82 (1998); Hansson, L. O., et al., J. Mol. Biol. 287:265-76 (1999); and Lorenzo, M. M. and Blasco, R. Biotechniques 24(2):308-13 (1998) (each of these patents and publications are hereby incorporated by reference). In one embodiment, alteration of polynucleotides and corresponding polypeptides of the invention may be achieved by DNA shuffling. DNA shuffling involves the assembly of two or more DNA segments into a desired polynucleotide sequence of the invention molecule by homologous, or site-specific, recombination. In another embodiment, polynucleotides and corresponding polypeptides of the invention may be altered by being subjected to random mutagenesis by error-prone PCR, random nucleotide insertion or other methods prior to recombination. In another embodiment, one or more components, motifs, sections, parts, domains, fragments, etc., of the polypeptides of the invention may be recombined with one or more components, motifs, sections, parts, domains, fragments, etc. of one or more heterologous molecules. In preferred embodiments, the heterologous molecules are family members. In further preferred embodiments, the heterologous molecule is a growth factor such as, for example, platelet-derived growth factor (PDGF), insulin-like growth factor (IGF-I), transforming growth factor (TGF)-alpha, epidermal growth factor (EGF), fibroblast growth factor (FGF), TGF-beta, bone morphogenetic protein (BMP)-2, BMP-4, BMP-5, BMP-6, BMP-7, activins A and B, decapentaplegic(dpp), 60A, OP-2, dorsalin, growth differentiation factors (GDFs), nodal, MIS, inhibin-alpha, TGF-betal, TGF-beta2, TGF-beta3, TGF-beta5, and glial-derived neurotrophic factor (GDNF).

[0899] Other preferred fragments are biologically active fragments of the polypeptides of the invention. Biologically active fragments are those exhibiting activity similar, but not necessarily identical, to an activity of the polypeptide. The biological activity of the fragments may include an improved desired activity, or a decreased undesirable activity.

[0900] Additionally, this invention provides a method of screening compounds to identify those which modulate the action of the polypeptide of the present invention. An example of such an assay comprises combining a mammalian fibroblast cell, a the polypeptide of the present invention, the compound to be screened and 3[H] thymidine under cell culture conditions where the fibroblast cell would normally proliferate. A control assay may be performed in the absence of the compound to be screened and compared to the amount of fibroblast proliferation in the presence of the compound to determine if the compound stimulates proliferation by determining the uptake of 3[H] thynidine in each case. The amount of fibroblast cell proliferation is measured by liquid scintillation chromatography which measures the incorporation of 3[H] thymidine. Both agonist and antagonist compounds may be identified by this procedure.

[0901] In another method, a mammalian cell or membrane preparation expressing a receptor for a polypeptide of the present invention is incubated with a labeled polypeptide of the present invention in the presence of the compound. The ability of the compound to enhance or block this interaction could then be measured. Alternatively, the response of a known second messenger system following interaction of a compound to be screened and the receptor is measured and the ability of the compound to bind to the receptor and elicit a second messenger response is measured to determine if the compound is a potential agonist or antagonist. Such second messenger systems include but are not limited to, cAMP guanylate cyclase, ion channels or phosphoinositide hydrolysis.

[0902] All of these above assays can be used as diagnostic or prognostic markers. The molecules discovered using these assays can be used to treat, prevent, and/or diagnose disease or to bring about a particular result in a patient (e.g., blood vessel growth) by activating or inhibiting the polypeptide/molecule. Moreover, the assays can discover agents which may inhibit or enhance the production of the polypeptides of the invention from suitably manipulated cells or tissues. Therefore, the invention includes a method of identifying compounds which bind to the polypeptides of the invention comprising the steps of: (a) incubating a candidate binding compound with the polypeptide; and (b) determining if binding has occurred. Moreover, the invention includes a method of identifying agonists/antagonists comprising the steps of: (a) incubating a candidate compound with the polypeptide, (b) assaying a biological activity , and (b) determining if a biological activity of the polypeptide has been altered.

[0903] Also, one could identify molecules bind a polypeptide of the invention experimentally by using the beta-pleated sheet regions contained in the polypeptide sequence of the protein. Accordingly, specific embodiments of the invention are directed to polynucleotides encoding polypeptides which comprise, or alternatively consist of, the amino acid sequence of each beta pleated sheet regions in a disclosed polypeptide sequence. Additional embodiments of the invention are directed to polynucleotides encoding polypeptides which comprise, or alternatively consist of, any combination or all of contained in the polypeptide sequences of the invention. Additional preferred embodiments of the invention are directed to polypeptides which comprise, or alternatively consist of, the amino acid sequence of each of the beta pleated sheet regions in one of the polypeptide sequences of the invention. Additional embodiments of the invention are directed to polypeptides which comprise, or alternatively consist of, any combination or all of the beta pleated sheet regions in one of the polypeptide sequences of the invention.

[0904] Targeted Delivery

[0905] In another embodiment, the invention provides a method of delivering compositions to targeted cells expressing a receptor for a polypeptide of the invention, or cells expressing a cell bound form of a polypeptide of the invention.

[0906] As discussed herein, polypeptides or antibodies of the invention may be associated with heterologous polypeptides, heterologous nucleic acids, toxins, or prodrugs via hydrophobic, hydrophilic, ionic and/or covalent interactions. In one embodiment, the invention provides a method for the specific delivery of compositions of the invention to cells by administering polypeptides of the invention (including antibodies) that are associated with heterologous polypeptides or nucleic acids. In one example, the invention provides a method for delivering a therapeutic protein into the targeted cell. In another example, the invention provides a method for delivering a single stranded nucleic acid (e.g., antisense or ribozymes) or double stranded nucleic acid (e.g., DNA that can integrate into the cell's genome or replicate episomally and that can be transcribed) into the targeted cell.

[0907] In another embodiment, the invention provides a method for the specific destruction of cells (e.g., the destruction of tumor cells) by administering polypeptides of the invention (e.g., polypeptides of the invention or antibodies of the invention) in association with toxins or cytotoxic prodrugs.

[0908] By “toxin” is meant compounds that bind and activate endogenous cytotoxic effector systems, radioisotopes, holotoxins, modified toxins, catalytic subunits of toxins, or any molecules or enzymes not normally present in or on the surface of a cell that under defined conditions cause the cell's death. Toxins that may be used according to the methods of the invention include, but are not limited to, radioisotopes known in the art, compounds such as, for example, antibodies (or complement fixing containing portions thereof) that bind an inherent or induced endogenous cytotoxic effector system, thymidine kinase, endonuclease, RNAse, alpha toxin, ricin, abrin, Pseudomonas exotoxin A, diphtheria toxin, saporin, momordin, gelonin, pokeweed antiviral protein, alpha-sarcin and cholera toxin. By “cytotoxic prodrug” is meant a non-toxic compound that is converted by an enzyme, normally present in the cell, into a cytotoxic compound. Cytotoxic prodrugs that may be used according to the methods of the invention include, but are not limited to, glutamyl derivatives of benzoic acid mustard alkylating agent, phosphate derivatives of etoposide or mitomycin C, cytosine arabinoside, daunorubisin, and phenoxyacetamide derivatives of doxorubicin.

[0909] Drug Screening

[0910] Further contemplated is the use of the polypeptides of the present invention, or the polynucleotides encoding these polypeptides, to screen for molecules which modify the activities of the polypeptides of the present invention. Such a method would include contacting the polypeptide of the present invention with a selected compound(s) suspected of having antagonist or agonist activity, and assaying the activity of these polypeptides following binding.

[0911] This invention is particularly useful for screening therapeutic compounds by using the polypeptides of the present invention, or binding fragments thereof, in any of a variety of drug screening techniques. The polypeptide or fragment employed in such a test may be affixed to a solid support, expressed on a cell surface, free in solution, or located intracellularly. One method of drug screening utilizes eukaryotic or prokaryotic host cells which are stably transformed with recombinant nucleic acids expressing the polypeptide or fragment. Drugs are screened against such transformed cells in competitive binding assays. One may measure, for example, the formulation of complexes between the agent being tested and a polypeptide of the present invention.

[0912] Thus, the present invention provides methods of screening for drugs or any other agents which affect activities mediated by the polypeptides of the present invention. These methods comprise contacting such an agent with a polypeptide of the present invention or a fragment thereof and assaying for the presence of a complex between the agent and the polypeptide or a fragment thereof, by methods well known in the art. In such a competitive binding assay, the agents to screen are typically labeled. Following incubation, free agent is separated from that present in bound form, and the amount of free or uncomplexed label is a measure of the ability of a particular agent to bind to the polypeptides of the present invention.

[0913] Another technique for drug screening provides high throughput screening for compounds having suitable binding affinity to the polypeptides of the present invention, and is described in great detail in European Patent Application 84/03564, published on Sep. 13, 1984, which is incorporated herein by reference herein. Briefly stated, large numbers of different small peptide test compounds are synthesized on a solid substrate, such as plastic pins or some other surface. The peptide test compounds are reacted with polypeptides of the present invention and washed. Bound polypeptides are then detected by methods well known in the art. Purified polypeptides are coated directly onto plates for use in the aforementioned drug screening techniques. In addition, non-neutralizing antibodies may be used to capture the peptide and immobilize it on the solid support.

[0914] This invention also contemplates the use of competitive drug screening assays in which neutralizing antibodies capable of binding polypeptides of the present invention specifically compete with a test compound for binding to the polypeptides or fragments thereof. In this manner, the antibodies are used to detect the presence of any peptide which shares one or more antigenic epitopes with a polypeptide of the invention.

[0915] Antisense And Ribozyme (Antagonists)

[0916] In specific embodiments, antagonists according to the present invention are nucleic acids corresponding to the sequences contained in SEQ ID NO:X, or the complementary strand thereof. In one embodiment, antisense sequence is generated internally by the organism, in another embodiment, the antisense sequence is separately administered (see, for example, O'Connor, Neurochem., 56:560 (1991). Oligodeoxynucleotides as Antisense Inhibitors of Gene Expression, CRC Press, Boca Raton, Fla. (1988). Antisense technology can be used to control gene expression through antisense DNA or RNA, or through triple-helix formation. Antisense techniques are discussed for example, in Okano, Neurochem., 56:560 (1991); Oligodeoxynucleotides as Antisense Inhibitors of Gene Expression, CRC Press, Boca Raton, Fla. (1988). Triple helix formation is discussed in, for instance, Lee et al., Nucleic Acids Research, 6:3073 (1979); Cooney et al., Science, 241:456 (1988); and Dervan et al., Science, 251:1300 (1991). The methods are based on binding of a polynucleotide to a complementary DNA or RNA.

[0917] For example, the use of c-myc and c-myb antisense RNA constructs to inhibit the growth of the non-lymphocytic leukemia cell line HL-60 and other cell lines was previously described. (Wickstrom et al. (1988); Anfossi et al. (1989)). These experiments were performed in vitro by incubating cells with the oligoribonucleotide. A similar procedure for in vivo use is described in WO 91/15580. Briefly, a pair of oligonucleotides for a given antisense RNA is produced as follows: A sequence complimentary to the first 15 bases of the open reading frame is flanked by an EcoR I site on the 5 end and a HindIII site on the 3 end. Next, the pair of oligonucleotides is heated at 90° C. for one minute and then annealed in 2X ligation buffer (20mM TRIS HCl pH 7.5, 10 mM MgCl2, 10MM dithiothreitol (DTT) and 0.2 mM ATP) and then ligated to the EcoR1/Hind III site of the retroviral vector PMV7 (WO 91/15580).

[0918] For example, the 5′ coding portion of a polynucleotide that encodes the mature polypeptide of the present invention may be used to design an antisense RNA oligonucleotide of from about 10 to 40 base pairs in length. A DNA oligonucleotide is designed to be complementary to a region of the gene involved in transcription thereby preventing transcription and the production of the receptor. The antisense RNA oligonucleotide hybridizes to the mRNA in vivo and blocks translation of the mRNA molecule into receptor polypeptide.

[0919] In one embodiment, the antisense nucleic acid of the invention is produced intracellularly by transcription from an exogenous sequence. For example, a vector or a portion thereof, is transcribed, producing an antisense nucleic acid (RNA) of the invention. Such a vector would contain a sequence encoding the antisense nucleic acid of the invention. Such a vector can remain episomal or become chromosomally integrated, as long as it can be transcribed to produce the desired antisense RNA. Such vectors can be constructed by recombinant DNA technology methods standard in the art. Vectors can be plasmid, viral, or others known in the art, used for replication and expression in vertebrate cells. Expression of the sequence encoding a polypeptide of the invention, or fragments thereof, can be by any promoter known in the art to act in vertebrate, preferably human cells. Such promoters can be inducible or constitutive. Such promoters include, but are not limited to, the SV40 early promoter region (Bemoist and Chambon, Nature, 29:304-310 (1981), the promoter contained in the 3′ long terminal repeat of Rous sarcoma virus (Yamamoto et al., Cell, 22:787-797 (1980), the herpes thymidine promoter (Wagner et al., Proc. Natl. Acad. Sci. U.S.A., 78:1441-1445 (1981), the regulatory sequences of the metallothionein gene (Brinster et al., Nature, 296:39-42 (1982)), etc.

[0920] The antisense nucleic acids of the invention comprise a sequence complementary to at least a portion of an RNA transcript of a gene of interest. However, absolute complementarity, although preferred, is not required. A sequence “complementary to at least a portion of an RNA,” referred to herein, means a sequence having sufficient complementarity to be able to hybridize with the RNA, forming a stable duplex; in the case of double stranded antisense nucleic acids of the invention, a single strand of the duplex DNA may thus be tested, or triplex formation may be assayed. The ability to hybridize will depend on both the degree of complementarity and the length of the antisense nucleic acid Generally, the larger the hybridizing nucleic acid, the more base mismatches with a RNA sequence of the invention it may contain and still form a stable duplex (or triplex as the case may be). One skilled in the art can ascertain a tolerable degree of mismatch by use of standard procedures to determine the melting point of the hybridized complex.

[0921] Oligonucleotides that are complementary to the 5′ end of the message, e.g., the 5′ untranslated sequence up to and including the AUG initiation codon, should work most efficiently at inhibiting translation. However, sequences complementary to the 3′ untranslated sequences of mRNAs have been shown to be effective at inhibiting translation of mRNAs as well. See generally, Wagner, R., Nature, 372:333-335 (1994). Thus, oligonucleotides complementary to either the 5′- or 3′- non-translated, non-coding regions of a polynucleotide sequence of the invention could be used in an antisense approach to inhibit translation of endogenous mRNA. Oligonucleotides complementary to the 5′ untranslated region of the mRNA should include the complement of the AUG start codon. Antisense oligonucleotides complementary to mRNA coding regions are less efficient inhibitors of translation but could be used in accordance with the invention. Whether designed to hybridize to the 5′-, 3′- or coding region of mRNA, antisense nucleic acids should be at least six nucleotides in length, and are preferably oligonucleotides ranging from 6 to about 50 nucleotides in length. In specific aspects the oligonucleotide is at least 10 nucleotides, at least 17 nucleotides, at least 25 nucleotides or at least 50 nucleotides.

[0922] The polynucleotides of the invention can be DNA or RNA or chimeric mixtures or derivatives or modified versions thereof, single-stranded or double-stranded. The oligonucleotide can be modified at the base moiety, sugar moiety, or phosphate backbone, for example, to improve stability of the molecule, hybridization, etc. The oligonucleotide may include other appended groups such as peptides (e.g., for targeting host cell receptors in vivo), or agents facilitating transport across the cell membrane (see, e.g., Letsinger et al., Proc. Natl. Acad. Sci. U.S.A. 86:6553-6556 (1989); Lemaitre et al., Proc. Natl. Acad. Sci., 84:648-652 (1987); PCT Publication No.: WO88/09810, published Dec. 15, 1988) or the blood-brain barrier (see, e.g., PCT Publication No.: WO89/10134, published Apr. 25, 1988), hybridization-triggered cleavage agents. (See, e.g., Krol et al., BioTechniques, 6:958-976 (1988)) or intercalating agents. (See, e.g., Zon, Pharm. Res., 5:539-549 (1988)). To this end, the oligonucleotide may be conjugated to another molecule, e.g., a peptide, hybridization triggered cross-linking agent, transport agent, hybridization-triggered cleavage agent, etc.

[0923] The antisense oligonucleotide may comprise at least one modified base moiety which is selected from the group including, but not limited to, 5-fluorouracil, 5-bromouracil, 5-chlorouracil, 5-iodouracil, hypoxanthine, xanthine, 4-acetylcytosine, 5-(carboxyhydroxylmethyl) uracil, 5-carboxymethylaminomethyl-2-thiouridine, 5-carboxymethylaminomethyluracil, dihydrouracil, beta-D-galactosylqueosine, inosine, N6-isopentenyladenine, 1-methylguanine, 1-methylinosine, 2,2-dimethylguanine, 2-methyladenine, 2-methylguanine, 3-methylcytosine, 5-methylcytosine, N6-adenine, 7-methylguanine, 5-methylaminomethyluracil, 5-methoxyaminomethyl-2-thiouracil, beta-D-mannosylqueosine, 5′-methoxycarboxymethyluracil, 5-methoxyuracil, 2-methylthio-N6-isopentenyladenine, uracil-5-oxyacetic acid (v), wybutoxosine, pseudouracil, queosine, 2-thiocytosine, 5-methyl-2-thiouracil, 2-thiouracil, 4-thiouracil, 5-methyluracil, uracil-5-oxyacetic acid methylester, uracil-5-oxyacetic acid (v), 5-methyl-2-thiouracil, 3-(3-amino-3-N-2-carboxypropyl) uracil, (acp3)w, and 2,6-diaminopurine.

[0924] The antisense oligonucleotide may also comprise at least one modified sugar moiety selected from the group including, but not limited to, arabinose, 2-fluoroarabinose, xylulose, and hexose.

[0925] In yet another embodiment, the antisense oligonucleotide comprises at least one modified phosphate backbone selected from the group including, but not limited to, a phosphorothioate, a phosphorodithioate, a phosphoramidothioate, a phosphoramidate, a phosphordiamidate, a methylphosphonate, an alkyl phosphotriester, and a formacetal or analog thereof.

[0926] In yet another embodiment, the antisense oligonucleotide is an a-anomeric oligonucleotide. An a-anomeric oligonucleotide forms specific double-stranded hybrids with complementary RNA in which, contrary to the usual b-units, the strands run parallel to each other (Gautier et al., Nucl. Acids Res., 15:6625-6641 (1987)). The oligonucleotide is a 2-0-methylribonucleotide (Inoue et al., Nucl. Acids Res., 15:6131-6148 (1987)), or a chimeric RNA-DNA analogue (Inoue et al., FEBS Lett. 215:327-330 (1987)).

[0927] Polynucleotides of the invention may be synthesized by standard methods known in the art, e.g. by use of an automated DNA synthesizer (such as are commercially available from Biosearch, Applied Biosystems, etc.). As examples, phosphorothioate oligonucleotides may be synthesized by the method of Stein et al. (Nucl. Acids Res., 16:3209 (1988)), methylphosphonate oligonucleotides can be prepared by use of controlled pore glass polymer supports (Sarin et al., Proc. Natl. Acad. Sci. U.S.A., 85:7448-7451 (1988)), etc.

[0928] While antisense nucleotides complementary to the coding region sequence of the invention could be used, those complementary to the transcribed untranslated region are most preferred.

[0929] Potential antagonists according to the invention also include catalytic RNA, or a ribozyme (See, e.g., PCT International Publication WO 90/11364, published Oct. 4, 1990; Sarver et al, Science, 247:1222-1225 (1990). While ribozymes that cleave mRNA at site specific recognition sequences can be used to destroy mRNAs corresponding to the polynucleotides of the invention, the use of hammerhead ribozymes is preferred. Hammerhead ribozymes cleave mRNAs at locations dictated by flanking regions that form complementary base pairs with the target mRNA. The sole requirement is that the target mRNA have the following sequence of two bases: 5′-UG-3′. The construction and production of hammerhead ribozymes is well known in the art and is described more fully in Haseloff and Gerlach, Nature, 334:585-591 (1988). There are numerous potential hammerhead ribozyme cleavage sites within each nucleotide sequence disclosed in the sequence listing. Preferably, the ribozyme is engineered so that the cleavage recognition site is located near the 5′ end of the mRNA corresponding to the polynucleotides of the invention; i.e., to increase efficiency and minimize the intracellular accumulation of non-functional mRNA transcripts.

[0930] As in the antisense approach, the ribozymes of the invention can be composed of modified oligonucleotides (e.g. for improved stability, targeting, etc.) and should be delivered to cells which express the polynucleotides of the invention in vivo. DNA constructs encoding the ribozyme may be introduced into the cell in the same manner as described above for the introduction of antisense encoding DNA. A preferred method of delivery involves using a DNA construct “encoding” the ribozyme under the control of a strong constitutive promoter, such as, for example, pol III or pol II promoter, so that transfected cells will produce sufficient quantities of the ribozyme to destroy endogenous messages and inhibit translation. Since ribozymes unlike antisense molecules, are catalytic, a lower intracellular concentration is required for efficiency.

[0931] Antagonist/agonist compounds may be employed to inhibit the cell growth and proliferation effects of the polypeptides of the present invention on neoplastic cells and tissues, i.e. stimulation of angiogenesis of tumors, and, therefore, retard or prevent abnormal cellular growth and proliferation, for example, in tumor formation or growth.

[0932] The antagonist/agonist may also be employed to prevent hyper-vascular diseases, and prevent the proliferation of epithelial lens cells after extracapsular cataract surgery. Prevention of the mitogenic activity of the polypeptides of the present invention may also be desirous in cases such as restenosis after balloon angioplasty.

[0933] The antagonist/agonist may also be employed to prevent the growth of scar tissue during wound healing.

[0934] The antagonist/agonist may also be employed to treat, prevent, and/or diagnose the diseases described herein.

[0935] Thus, the invention provides a method of treating or preventing diseases, disorders, and/or conditions, including but not limited to the diseases, disorders, and/or conditions listed throughout this application, associated with overexpression of a polynucleotide of the present invention by administering to a patient (a) an antisense molecule directed to the polynucleotide of the present invention, and/or (b) a ribozyme directed to the polynucleotide of the present invention.

[0936] invention, and/or (b) a ribozyme directed to the polynucleotide of the present invention.

[0937] Biotic Associations

[0938] A polynucleotide or polypeptide and/or agonist or antagonist of the present invention may increase the organisms ability, either directly or indirectly, to initiate and/or maintain biotic associations with other organisms. Such associations may be symbiotic, nonsymbiotic, endosymbiotic, macrosymbiotic, and/or microsymbiotic in nature. In general, a polynucleotide or polypeptide and/or agonist or antagonist of the present invention may increase the organisms ability to form biotic associations with any member of the fungal, bacterial, lichen, mycorrhizal, cyanobacterial, dinoflaggellate, and/or algal, kingdom, phylums, families, classes, genuses, and/or species.

[0939] The mechanism by which a polynucleotide or polypeptide and/or agonist or antagonist of the present invention may increase the host organisms ability, either directly or indirectly, to initiate and/or maintain biotic associations is variable, though may include, modulating osmolarity to desirable levels for the symbiont, modulating pH to desirable levels for the symbiont, modulating secretions of organic acids, modulating the secretion of specific proteins, phenolic compounds, nutrients, or the increased expression of a protein required for host-biotic organisms interactions (e.g., a receptor, ligand, etc.). Additional mechanisms are known in the art and are encompassed by the invention (see, for example, “Microbial Signalling and Communication”, eds., R. England, G. Hobbs, N. Bainton, and D. McL. Roberts, Cambridge University Press, Cambridge, (1999); which is hereby incorporated herein by reference).

[0940] In an alternative embodiment, a polynucleotide or polypeptide and/or agonist or antagonist of the present invention may decrease the host organisms ability to form biotic associations with another organism, either directly or indirectly. The mechanism by which a polynucleotide or polypeptide and/or agonist or antagonist of the present invention may decrease the host organisms ability, either directly or indirectly, to initiate and/or maintain biotic associations with another organism is variable, though may include, modulating osmolarity to undesirable levels, modulating pH to undesirable levels, modulating secretions of organic acids, modulating the secretion of specific proteins, phenolic compounds, nutrients, or the decreased expression of a protein required for host-biotic organisms interactions (e.g., a receptor, ligand, etc.). Additional mechanisms are known in the art and are encompassed by the invention (see, for example, “Microbial Signalling and Communication”, eds., R. England, G. Hobbs, N. Bainton, and D. McL. Roberts, Cambridge University Press, Cambridge, (1999); which is hereby incorporated herein by reference).

[0941] The hosts ability to maintain biotic associations with a particular pathogen has significant implications for the overall health and fitness of the host. For example, human hosts have symbiosis with enteric bacteria in their gastrointestinal tracts, particularly in the small and large intestine. In fact, bacteria counts in feces of the distal colon often approach 10¹² per milliliter of feces. Examples of bowel flora in the gastrointestinal tract are members of the Enterobacteriaceae, Bacteriodes, in addition to a-hemolytic streptococci, E. coli, Bifobacteria, Anaerobic cocci, Eubacteria, Costridia, lactobacilli, and yeasts. Such bacteria, among other things, assist the host in -the assimilation of nutrients by breaking down food stuffs not typically broken down by the hosts digestive system, particularly in the hosts bowel. Therefore, increasing the hosts ability to maintain such a biotic association would help assure proper nutrition for the host.

[0942] Aberrations in the enteric bacterial population of mammals, particularly humans, has been associated with the following disorders: diarrhea, ileus, chronic inflammatory disease, bowel obstruction, duodenal diverticula, biliary calculous disease, and malnutrition. A polynucleotide or polypeptide and/or agonist or antagonist of the present invention are useful for treating, detecting, diagnosing, prognosing, and/or ameliorating, either directly or indirectly, and of the above mentioned diseases and/or disorders associated with aberrant enteric flora population.

[0943] The composition of the intestinal flora, for example, is based upon a variety of factors, which include, but are not limited to, the age, race, diet, malnutrition, gastric acidity, bile salt excretion, gut motility, and immune mechanisms. As a result, the polynucleotides and polypeptides, including agonists, antagonists, and fragments thereof, may modulate the ability of a host to form biotic associations by affecting, directly or indirectly, at least one or more of these factors.

[0944] Although the predominate intestinal flora comprises anaerobic organisms, an underlying percentage represents aerobes (e.g., E. coli). This is significant as such aerobes rapidly become the predominate organisms in intraabdominal infections—effectively becoming opportunistic early in infection pathogenesis. As a result, there is an intrinsic need to control aerobe populations, particularly for immune compromised individuals.

[0945] In a preferred embodiment, a polynucleotides and polypeptides, including agonists, antagonists, and fragments thereof, are useful for inhibiting biotic associations with specific enteric symbiont organisms in an effort to control the population of such organisms.

[0946] Biotic associations occur not only in the gastrointestinal tract, but also on an in the integument. As opposed to the gastrointestinal flora, the cutaneous flora is comprised almost equally with aerobic and anaerobic organisms. Examples of cutaneous flora are members of the gram-positive cocci (e.g., S. aureus, coagulase-negative staphylococci, micrococcus, M.sedentarius), gram-positive bacilli (e.g., Corynebacterium species, C. minutissimum, Brevibacterium species, Propoionibacterium species, P.acnes), gram-negative bacilli (e.g., Acinebacter species), and fungi (Pityrosporum orbiculare). The relatively low number of flora associated with the integument is based upon the inability of many organisms to adhere to the skin. The organisms referenced above have acquired this unique ability. Therefore, the polynucleotides and polypeptides of the present invention may have uses which include modulating the population of the cutaneous flora, either directly or indirectly.

[0947] Aberrations in the cutaneous flora are associated with a number of significant diseases and/or disorders, which include, but are not limited to the following: impetigo, ecthyma, blistering distal dactulitis, pustules, folliculitis, cutaneous abscesses, pitted keratolysis, trichomycosis axcillaris, dermatophytosis complex, axillary odor, erthyrasma, cheesy foot odor, acne, tinea versicolor, seborrheic dermititis, and Pityrosporum folliculitis, to name a few. A polynucleotide or polypeptide and/or agonist or antagonist of the present invention are useful for treating, detecting, diagnosing, prognosing, and/or ameliorating, either directly or indirectly, and of the above mentioned diseases and/or disorders associated with aberrant cutaneous flora population.

[0948] Additional biotic associations, including diseases and disorders associated with the aberrant growth of such associations, are known in the art and are encompassed by the invention. See, for example, “Infectious Disease”, Second Edition, Eds., S. L., Gorbach, J. G., Bartlett, and N. R., Blacklow, W. B. Saunders Company, Philadelphia, (1998); which is hereby incorporated herein by reference).

[0949] Pheromones

[0950] In another embodiment, a polynucleotide or polypeptide and/or agonist or antagonist of the present invention may increase the organisms ability to synthesize and/or release a pheromone. Such a pheromone may, for example, alter the organisms behavior and/or metabolism.

[0951] A polynucleotide or polypeptide and/or agonist or antagonist of the present invention may modulate the biosynthesis and/or release of pheromones, the organisms ability to respond to pheromones (e.g., behaviorally, and/or metabolically), and/or the organisms ability to detect pheromones. Preferably, any of the pheromones, and/or volatiles released from the organism, or induced, by a polynucleotide or polypeptide and/or agonist or antagonist of the invention have behavioral effects the organism.

[0952] Other Activities

[0953] The polypeptide of the present invention, as a result of the ability to stimulate vascular endothelial cell growth, may be employed in treatment for stimulating re-vascularization of ischemic tissues due to various disease conditions such as thrombosis, arteriosclerosis, and other cardiovascular conditions. These polypeptide may also be employed to stimulate angiogenesis and limb regeneration, as discussed above.

[0954] The polypeptide may also be employed for treating wounds due to injuries, burns, post-operative tissue repair, and ulcers since they are mitogenic to various cells of different origins, such as fibroblast cells and skeletal muscle cells, and therefore, facilitate the repair or replacement of damaged or diseased tissue.

[0955] The polypeptide of the invention may also be employed to maintain organs before transplantation or for supporting cell culture of primary tissues.

[0956] The polypeptide of the present invention may also be employed for inducing tissue of mesodermal origin to differentiate in early embryos.

[0957] The polypeptide or polynucleotides and/or agonist or antagonists of the present invention may also increase or decrease the differentiation or proliferation of embryonic stem cells, besides, as discussed above, hematopoietic lineage.

[0958] The polypeptide or polynucleotides and/or agonist or antagonists of the present invention may also be used to modulate mammalian characteristics, such as body height, weight, hair color, eye color, skin, percentage of adipose tissue, pigmentation, size, and shape (e.g., cosmetic surgery). Similarly, polypeptides or polynucleotides and/or agonist or antagonists of the present invention may be used to modulate mammalian metabolism affecting catabolism, anabolism, processing, utilization, and storage of energy.

[0959] Polypeptide or polynucleotides and/or agonist or antagonists of the present invention may be used to change a mammal's mental state or physical state by influencing biorhythms, caricadic rhythms, depression (including depressive diseases, disorders, and/or conditions), tendency for violence, tolerance for pain, reproductive capabilities (preferably by Activin or Inhibin-like activity), hormonal or endocrine levels, appetite, libido, memory, stress, or other cognitive qualities.

[0960] Polypeptide or polynucleotides and/or agonist or antagonists of the present invention may also be used as a food additive or preservative, such as to increase or decrease storage capabilities, fat content, lipid, protein, carbohydrate, vitamins, minerals, cofactors or other nutritional components.

[0961] Other Preferred Embodiments

[0962] Other preferred embodiments of the claimed invention include an isolated nucleic acid molecule comprising a nucleotide sequence containing one or more polymorphic positions and is at least about 20, 25, 30, 35, 40, 45, or 50 contiguous nucleotides and is derived from a nucleotide sequence defined in Table I, IV, V, or VI.

[0963] Also preferred is a nucleic acid molecule wherein said sequence of contiguous nucleotides is included in the nucleotide sequence of SEQ ID NO:X in the range of positions beginning with the nucleotide at about the position of the “5′ NT of Start Codon of ORF” and ending with the nucleotide at about the position of the “3′ NT of ORF” as defined for SEQ ID NO:X in Table I.

[0964] Also preferred is an isolated nucleic acid molecule comprising a nucleotide sequence containing at least one or more polymorphic positions and is at least about 150 contiguous nucleotides in the nucleotide sequence of SEQ ID NO:X.

[0965] Further preferred is an isolated nucleic acid molecule comprising a nucleotide sequence containing at least one or more polymorphic positions and is at least about 500 contiguous nucleotides in the nucleotide sequence of SEQ ID NO:X.

[0966] A further preferred embodiment is a nucleic acid molecule comprising a nucleotide sequence containing one or more polymorphic positions and corresponds to, or is derived from, SEQ ID NO:X beginning with the nucleotide at about the position of the “5′ NT of ORF” and ending with the nucleotide at about the position of the “3′ NT of ORF” as defined for SEQ ID NO:X in Table I.

[0967] A further preferred embodiment is an isolated nucleic acid molecule comprising a nucleotide sequence containing one or more polymorphic positions and correponds to, or is derived from, the complete nucleotide sequence of SEQ ID NO:X.

[0968] Also preferred is an isolated nucleic acid molecule which hybridizes under stringent hybridization conditions to a nucleic acid molecule, wherein said nucleic acid molecule which hybridizes does not hybridize under stringent hybridization conditions to a nucleic acid molecule having a nucleotide sequence consisting of only A residues or of only T residues.

[0969] Also preferred is a composition of matter comprising a DNA molecule which comprises a cDNA clone identified by a cDNA Identifier in Table I, and/or an SNP_ID Identifier in Table IV, V, and/or VI.

[0970] Also preferred is an isolated nucleic acid molecule comprising a nucleotide sequence containing at least one or more polymorphic positions and is at least 20 contiguous nucleotides in the nucleotide sequence of a cDNA clone identified by a cDNA Clone Identifier in Table I, and/or an SNP_ID Identifier in Table IV, V, and/or VI.

[0971] Also preferred is an isolated nucleic acid molecule, wherein said sequence of at least 20 contiguous nucleotides is included in the nucleotide sequence of the complete open reading frame sequence encoded by said cDNA clone.

[0972] A further preferred embodiment is a method for detecting in a biological sample a nucleic acid molecule comprising a nucleotide sequence containing at least one or more polymorphic positions and is at least 20 contiguous nucleotides in a sequence selected from the group consisting of: a nucleotide sequence of SEQ ID NO:X wherein X is any integer as defined in Table I, IV, V, or VI; which method comprises a step of comparing a nucleotide sequence of at least one nucleic acid molecule in said sample with a sequence selected from said group and determining whether the sequence of said nucleic acid molecule in said sample contains one or more polymorphic positions relative to said selected sequence.

[0973] Also preferred is the above method wherein said step of comparing sequences comprises determining the extent of nucleic acid hybridization between nucleic acid molecules in said sample and a nucleic acid molecule comprising said sequence selected from said group. Similarly, also preferred is the above method wherein said step of comparing sequences is performed by comparing the nucleotide sequence determined from a nucleic acid molecule in said sample with said sequence selected from said group. The nucleic acid molecules can comprise DNA molecules or RNA molecules.

[0974] A further preferred embodiment is a method for identifying the species, tissue or cell type of a biological sample which method comprises a step of detecting nucleic acid molecules in said sample, if any, comprising a nucleotide sequence containing one or more polymorphic positions and corresponds to, or is derived from, a sequence that is at least 20 contiguous nucleotides in a sequence selected from the group consisting of: a nucleotide sequence of SEQ ID NO:X wherein X is any integer as defined in Table I, IV, V, or VI; and a nucleotide sequence encoded by a cDNA clone identified by a cDNA Clone Identifier in Table I, and/or an SNP_ID Identifier in Table IV, V, and/or VI.

[0975] The method for identifying the species, tissue or cell type of a biological sample can comprise a step of detecting nucleic acid molecules comprising a nucleotide sequence in a panel of at least two nucleotide sequences, wherein at least one sequence in said panel contains one or more polymorphic positions to a sequence of at least 20 contiguous nucleotides in a sequence selected from said group.

[0976] Also preferred is a method for diagnosing in a subject a pathological condition associated with abnormal structure or expression of a gene encoding a protein identified in Table I or Table VI, which method comprises a step of detecting in a biological sample obtained from said subject nucleic acid molecules, if any, comprising a nucleotide sequence that contains one or more polymorphic positions and corresponds to, or is derived from, a sequence that is at least 20 contiguous nucleotides in a sequence selected from the group consisting of: a nucleotide sequence of SEQ ID NO:X wherein X is any integer as defined in Table I, IV, V, or VI; and a nucleotide sequence encoded by a cDNA clone identified by a cDNA Clone Identifier in Table I, and/or an SNP_ID Identifier in Table IV, V, and/or VI.

[0977] The method for diagnosing a pathological condition can comprise a step of detecting nucleic acid molecules comprising a nucleotide sequence in a panel of at least two nucleotide sequences, wherein at least one sequence in said panel contains one or more polymorphic positions and is derived from, or corresponds to, a sequence that is at least 20 contiguous nucleotides in a sequence selected from said group.

[0978] Also preferred is a composition of matter comprising isolated nucleic acid molecules wherein the nucleotide sequences of said nucleic acid molecules comprise a panel of at least two nucleotide sequences, wherein at least one sequence in said panel contains one or more polymorphic positions and is derived from, or corresponds to, a sequence that is at least 20 contiguous nucleotides in a sequence selected from the group consisting of: a nucleotide sequence of SEQ ID NO:X wherein X is any integer as defined in Table I, IV, V, or VI; and a nucleotide sequence encoded by a cDNA clone identified by a cDNA Clone Identifier in Table I, and/or an SNP_ID Identifier in Table IV, V, and/or VI. The nucleic acid molecules can comprise DNA molecules or RNA molecules.

[0979] Also preferred is an isolated polypeptide comprising an amino acid sequence containing one or more polymorphic positions and is derived from, or corresponds to, a sequence that is at least about 10 contiguous amino acids in the amino acid sequence of SEQ ID NO:Y wherein Y is any integer as defined in Table I, and/or Table VI.

[0980] Also preferred is an isolated polypeptide comprising an amino acid sequence containing one or more polymorphic positions and is derived from, or corresponds to, a sequence that is at least about 10 contiguous amino acids and is encoded by a nucleotide sequence provided in Table I, IV, V, or VI.

[0981] Also preferred is a polypeptide, wherein said sequence of contiguous amino acids is included in the amino acid sequence of SEQ ID NO:Y in the range of positions “Total AA of the Open Reading Frame (ORF)” as set forth for SEQ ID NO:Y in Table I.

[0982] Also preferred is an isolated polypeptide comprising an amino acid sequence containing one or more polymorphic positions and is derived from, or corresponds to, a sequence that is at least about 30 contiguous amino acids in the amino acid sequence of SEQ ID NO:Y.

[0983] Further preferred is an isolated polypeptide comprising an amino acid sequence containing one or more polymorphic positions and is derived from, or corresponds to, a sequence that is at least about 100 contiguous amino acids in the amino acid sequence of SEQ ID NO:Y.

[0984] Further preferred is an isolated polypeptide comprising an amino acid sequence containing one or more polymorphic positions and is derived from, or corresponds to, the complete amino acid sequence of SEQ ID NO:Y.

[0985] Also preferred is a polypeptide wherein said sequence of contiguous amino acids is included in the amino acid sequence of the protein encoded by a cDNA clone identified by a cDNA Clone Identifier in Table I, and/or an SNP_ID Identifier in Table IV, V, and/or VI.

[0986] Also preferred is an isolated polypeptide comprising an amino acid sequence containing one or more polymorphic positions and is derived from, or corresponds to, a sequence that is at least about 30 contiguous amino acids in the amino acid sequence of the protein encoded by a cDNA clone identified by a cDNA Clone Identifier in Table I, and/or an SNP_ID Identifier in Table IV, V, and/or VI.

[0987] Also preferred is an isolated polypeptide comprising an amino acid sequence containing one or more polymorphic positions and is derived from, or corresponds to, a sequence that is at least about 100 contiguous amino acids in the amino acid sequence of the protein encoded by a cDNA clone identified by a cDNA Clone Identifier in Table I, and/or an SNP_ID Identifier in Table IV, V, and/or VI.

[0988] Also preferred is an isolated polypeptide comprising an amino acid sequence containing one or more polymorphic positions and is derived from, or corresponds to, the amino acid sequence of the protein encoded by a cDNA clone identified by a cDNA Clone Identifier in Table I, and/or an SNP_ID Identifier in Table IV, V, and/or VI.

[0989] Further preferred is an isolated antibody which binds specifically to a polypeptide comprising an amino acid sequence containing one or more polymorphic positions and is derived from, or corresponds to, a sequence that is at least 10 contiguous amino acids in a sequence selected from the group consisting of: an amino acid sequence of SEQ ID NO:Y wherein Y is any integer as defined in Table I, and/or in Table VI; and a complete amino acid sequence of a protein encoded by a cDNA clone identified by a cDNA Clone Identifier in Table I, and/or an SNP_ID Identifier in Table IV, V, and/or VI.

[0990] Further preferred is a method for detecting in a biological sample a polypeptide comprising an amino acid sequence containing one or more polymorphic positions and is derived from, or corresponds to, a sequence that is at least 10 contiguous amino acids in a sequence selected from the group consisting of: an amino acid sequence of SEQ ID NO:Y wherein Y is any integer as defined in Table I, and/or in Table VI; and a complete amino acid sequence of a protein encoded by a cDNA clone identified by a cDNA Clone Identifier in Table I, and/or an SNP_ID Identifier in Table IV, V, and/or VI; which method comprises a step of comparing an amino acid sequence of at least one polypeptide molecule in said sample with a sequence selected from said group and determining whether the sequence of said polypeptide molecule in said sample containing one or more polymorphic positions and is derived from, or corresponds to, a sequence that is at least 10 contiguous amino acids.

[0991] Also preferred is the above method wherein said step of comparing an amino acid sequence of at least one polypeptide molecule in said sample with a sequence selected from said group comprises determining the extent of specific binding of polypeptides in said sample to an antibody which binds specifically to a polypeptide comprising an amino acid sequence containing one or more polymorphic positions and is derived from, or corresponds to, a sequence that is at least 10 contiguous amino acids in a sequence selected from the group consisting of: an amino acid sequence of SEQ ID NO:Y wherein Y is any integer as defined in Table I, and/or in Table VI; and a complete amino acid sequence of a protein encoded by a cDNA clone identified by a cDNA Clone Identifier in Table I, and/or an SNP_ID Identifier in Table IV, V, and/or VI.

[0992] Also preferred is the above method wherein said step of comparing sequences is performed by comparing the amino acid sequence determined from a polypeptide molecule in said sample with said sequence selected from said group.

[0993] Also preferred is a method for identifying the species, tissue or cell type of a biological sample which method comprises a step of detecting polypeptide molecules in said sample, if any, comprising an amino acid sequence containing one or more polymorphic positions and is derived from, or corresponds to, a sequence that is at least 10 contiguous amino acids in a sequence selected from the group consisting of: an amino acid sequence of SEQ ID NO:Y wherein Y is any integer as defined in Table I, and/or in Table VI; and a complete amino acid sequence of a protein encoded by a cDNA clone identified by a cDNA Clone Identifier in Table I, and/or an SNP_ID Identifier in Table IV, V, and/or VI.

[0994] Also preferred is the above method for identifying the species, tissue or cell type of a biological sample, which method comprises a step of detecting polypeptide molecules comprising an amino acid sequence in a panel of at least two amino acid sequences, wherein at least one sequence in said panel containing one or more polymorphic positions and is derived from, or corresponds to, a sequence that is at least 10 contiguous amino acids in a sequence selected from the above group.

[0995] Also preferred is a method for diagnosing a pathological condition associated with an organism with abnormal structure or expression of a gene encoding a protein identified in Table I, or Table VI, which method comprises a step of detecting in a biological sample obtained from said subject polypeptide molecules comprising an amino acid sequence in a panel of at least two amino acid sequences, wherein at least one sequence in said panel containing one or more polymorphic positions and is derived from, or corresponds to, a sequence that is at least 10 contiguous amino acids in a sequence selected from the group consisting of: an amino acid sequence of SEQ ID NO:Y wherein Y is any integer as defined in Table I, and/or in Table VI; and a complete amino acid sequence of a protein encoded by a cDNA clone identified by a cDNA Clone Identifier in Table I, and/or an SNP_ID Identifier in Table IV, V, and/or VI.

[0996] In any of these methods, the step of detecting said polypeptide molecules includes using an antibody.

[0997] Also preferred is an isolated nucleic acid molecule, wherein said nucleotide sequence encoding a polypeptide has been optimized for expression of said polypeptide in a prokaryotic host.

[0998] Also preferred is an isolated nucleic acid molecule, wherein said polypeptide comprises an amino acid sequence selected from the group consisting of: an amino acid sequence of SEQ ID NO:Y wherein Y is any integer as defined in Table I, and/or in Table VI; and a complete amino acid sequence of a protein encoded by a cDNA clone identified by a cDNA Clone Identifier in Table I, and/or an SNP_ID Identifier in Table IV, V, and/or VI.

[0999] Further preferred is a method of making a recombinant vector comprising inserting any of the above isolated nucleic acid molecule(s) into a vector. Also preferred is the recombinant vector produced by this method. Also preferred is a method of making a recombinant host cell comprising introducing the vector into a host cell, as well as the recombinant host cell produced by this method.

[1000] Also preferred is a method of making an isolated polypeptide comprising culturing this recombinant host cell under conditions such that said polypeptide is expressed and recovering said polypeptide. Also preferred is this method of making an isolated polypeptide, wherein said recombinant host cell is a eukaryotic cell and said polypeptide is a protein comprising an amino acid sequence selected from the group consisting of: an amino acid sequence of SEQ II) NO:Y wherein Y is an integer set forth in Table I and said position of the “Total AA of ORF” of SEQ ID NO:Y is defined in Table I; and an amino acid sequence of a protein encoded by a cDNA clone identified by a cDNA Clone Identifier in Table I. The isolated polypeptide produced by this method is also preferred.

[1001] Also preferred is a method of treatment of an individual in need of an increased level of a protein activity, which method comprises administering to such an individual a pharmaceutical composition comprising an amount of an isolated polypeptide, polynucleotide, or antibody of the claimed invention effective to increase the level of said protein activity in said individual.

[1002] The following Examples are offered for the purpose of illustrating the present invention and are not to be construed to limit the scope of this invention. The teachings of all references cited herein are hereby incorporated herein by reference.

### References

[1003] Agostoni A, C. M., Cugno M, Zingale LC, Gioffre D, Nussberger J (1999). “Angioedema due to angiotensin-converting enzyme inhibitors.” Immunopharmacology 1999 Oct 15;44(1-2):21-5 44(1-2): 21-25.

[1004] Altschul S F, G. W., Miller W, Myers E W, Lipman D J (1990). “Basic local alignment search tool.” J Mol Biol 215(3): 403-410.

[1005] Anderson M W, d. R. (1990). “Studies of the mechanism of angiotensin-converting enzyme (ACE) inhibitor-associated angioedema: the effect of an ACE inhibitor on cutaneous responses to bradykinin, codeine, and histamine.” J Allergy Clin Immunol 85(5): 856-858.

[1006] Barnes, P. J. (1997). Bradykinin. Asthma. P. J. Barnes, M. M. Grunstein, A. R. Leff and A. J. Woolcock. Philadelphia New York, Lippincott-Raven. 1: 577-584.

[1007] Brown N.J., R. W., Snowden M, Griffin M R (1996). “Black Americans have an increased rate of angiotensin converting enzyme inhibitor-associated angioedema.” Clin Pharmacol Ther 60(1): 8-13.

[1008] Brown N. J., S. M., Griffin M R (1997). “Recurrent angiotensin-converting enzyme inhibitor—associated angioedema.” JAMA 278(3): 232-233.

[1009] Brown N J, V. D. (1998). “Angiotensin-converting enzyme inhibitors.” Circulation 97(14): 1411-1420.

[1010] Chen X, L. L., Kwok P Y. (1999). “Fluorescence polarization in homogeneous nucleic acid analysis.” Genome Res. 1999 May;9(5):492-8. 9(5): 492-498.

[1011] Coats, A. (2000). “Omapatrilat—the ups and downs of an exciting but complicated new drug.” Int J Cardiol 74(1): 1-3.

[1012] Cormack, B. (2000). Directed Mutagenesis Using the Polymerase Chain Reaction. Current Protocols in Molecular Biology, John Wiley & Sons, Inc. Supplement 37: 8.5.1-8.5.10.

[1013] Ebo D G, S. W. (2000). “Hereditary angioneurotic edema: review of the literature.” Acta Clin Belg 2000 Jan-Feb;55(1):22-9 55(1): 22-29.

[1014] Lennon G, A. C., Polymeropoulos M, Soares M B (1996). “The I.M.A.G.E. Consortium: an integrated molecular analysis of genomes and their expression.” Genomics 33(1): 151-152.

[1015] Marceau, F., J. Hess, et al. (1998). “The B1 receptors for kinins.” Pharmacol Rev 50(3): 357-386.

[1016] Marceau F, B. D. (1998). “Kinin receptors.” Clin Rev Allergy Immunol 16(4): 385-401.

[1017] Marceau F, L. J., Saint-Jacques E, Bachvarov D R. (1997). “The kinin B1 receptor: an inducible G protein coupled receptor.” Can J Physiol Pharmacol 75(6): 725-730.

[1018] Marceau F, L. J., Bouthillier J, Bachvarova M, Houle S, Bachvarov D R (1999). “Effect of endogenous kinins, prostanoids, and NO on kinin B1 and B2 receptor expression in the rabbit.” Am J Physiol 277(6 Pt 2): R1568-R1578.

[1019] Nickerson D A, T. V., Taylor S L. (1997). “PolyPhred: automating the detection and genotyping of single nucleotide substitutions using fluorescence-based resequencing.” Nucleic Acids Res 25(14): 2745-2751.

[1020] Nussberger, J., M. Cugno, et al. (1998). “Plasma bradykinin in angio-edema.” Lancet 351: 1693-1697.

[1021] Nussberger J, C. M., Cicardi M, Agostoni A. (1999). “Local bradykinin generation in hereditary angioedema.” J Allergy Clin Immunol. 1999 Dec:104(6):1321-2 104(6): 1321-1322.

[1022] Rieder M J, T. S., Clark A G, Nickerson DA (1999). “Sequence variation in the human angiotensin converting enzyme.” Nat Genet 22(1): 59-62.

[1023] Robl J A, S. C., Stevenson J, Ryono D E, Simpkins L M, Cimarusti M P, Dejneka T, Slusarchyk W A, Chao S, Stratton L, Misra R N, Bednarz M S, Asaad M M, Cheung H S, Abboa-Offei B E, Smith P L, Mathers P D, Fox M, Schaeffer T R, Seymour A A, Trippodo N C (1997). “Dual metalloprotease inhibitors: mercaptoacetyl-based fused heterocyclic dipeptide mimetics as inhibitors of angiotensin-converting enzyme and neutral endopeptidase.” J Med Chem 40(11): 1570-1577.

[1024] Rozen S, S. H. (2000). “Primer3 on the WWW for general users and for biologist programmers.” Methods Mol Biol 132: 365-386.

[1025] Sambrook, J., E. Fritsch, et al. (1989). Molecular Cloning, Cold Spring Harbor Laboratory Press.

[1026] Schiller P I, M. S., Haefeli W E, Schlienger R G, Bircher A J (1997). “Angiotensin-converting enzyme inhibitor-induced angioedema: late onset, irregular course, and potential role of triggers.” Allergy 52(4): 432-435.

[1027] Strader, C., T. Fong, et al. (1995). “The family of G-protein-coupled receptors.” FASEB J 9(9): 745-754.

[1028] Tosi, M. (1998). “Molecular genetics of C1 inhibitor.” Immunobiology 199(2): 358-365.

[1029] van Rijnsoever E W, K.-Z. W., Feenstra J. (1998). “Angioneurotic edema attributed to the use of losartan.” Arch Intern Med. 1998 Oct 12;158(18):2063-5. 158(18): 2063-2065.

### EXAMPLES

### Example 1

### Method Of Discovering The Single Nucleotide Polymorphisms (SNPs) Of The Present Invention

[1030] Candidate genes for SNP discovery were chosen from the bradykinin pathway based upon their involvement in the following pathway processes: i.) Generation of bradykinin and related peptides: C1 esterase inhibitor, kininogen, tissue and plasma kallikreins; ii.) Degradation of bradykinin, and related peptides: ACE, NEP, aminopeptidase P, carboxypeptidases M, N, and U; and iii.) Bradykinin signal transduction: B1 and B2 bradykinin receptors, NK1 tachykinin receptor. Specifically, the following genes were analyzed for the presence of potential SNPs: Aminopeptidase P (HGNC ID: XPNPEP2), Bradykinin Receptor B1 (HGNC_ID: BDKRB1), Bradykinin Receptor B2 (HGNC_ID: BDKRB2), Tachykinin Receptor 1 (HGNC_ID: TACR1), C1 Esterase Inhibitor (HGNC_ID: C1NH), Kallikrein 1 (renal/pancreas/salivary) (HGNC_ID: KLK1), Angiotension Converting Enzyme 2 (HGNC_ID: ACE2), and Protease Inhibitor 4 (HGNC_ID: P14 and/or SerpinA4).

[1031] SNP discovery was based on comparative DNA sequencing of PCR products derived from genomic DNA from multiple individuals. All the genomic DNA samples were purchased from Coriell Institute (Collingswood, N.J.) unless stated otherwise (see Table VIIA-D). PCR amplicons were designed to cover the entire coding region of the exons using the Primer3 program (Rozen S 2000). Exon-intron structure of candidate genes and intron sequences were obtained by blastn search of Genbank cDNA sequences against the human genome draft sequences. The sizes of these PCR amplicons varied according to the exon-intron structure. All the samples amplified from genomic DNA (20 ng) in reactions (50 ul) containing 10 mM Tris-C1 pH 8.3, 50 mM KCl, 2.5 mM MgCl₂, 150 uM dNTPs, 3 uM PCR primers, and 3.75 U TaqGold DNA polymerase (PE Biosystems).

[1032] PCR was performed in M J Research Tetrad machines under a cycling condition of 94 degrees 10 min, 30 cycles of 94 degrees 30 sec, 60 degrees 30 sec, and 72 degrees 30 sec, followed by 72 degrees 7 min. PCR products were purified using QIAquick PCR purification kit (Qiagen), and were sequenced by the dye-terminator method using PRISM 3700 automated DNA sequencer (Applied Biosystems, Foster City, Calif.) following the manufacturer's instruction outlined in the Owner's Manual (which is hereby incorporated herein by reference in its entirety). Sequencing results were analyzed for the presence of polymorphisms using PolyPhred software(Nickerson D A 1997; Rieder M J 1999). All the sequence traces of potential polymorphisms were visually inspected to confirm the presence of SNPs.

[1033] DNA sequences of PCR primers and sequencing primers used for SNP discovery are provided in Tables VIII and IX, respectfully.

[1034] Alternative methods for identifying SNPs of the present invention are known in the art. One such method involves resequencing of target sequences from individuals of diverse ethnic and geographic backgrounds by hybridization to probes immobilized to microfabricated arrays. The strategy and principles for the design and use of such arrays are generally described in WO 95/11995.

[1035] A typical probe array used in such as analysis would have two groups of four sets of probes that respectively tile both strands of a reference sequence. A first probe set comprises a plurality of probes exhibiting perfect complementarily with one of the reference sequences. Each probe in the first probe set has an interrogation position that corresponds to a nucleotide in the reference sequence. That is, the interrogation position is aligned with the corresponding nucleotide in the reference sequence, when the probe and reference sequence are aligned to maximize complementarily between the two. For each probe in the first set, there are three corresponding probes from three additional probe sets. Thus, there are four probes corresponding to each nucleotide in the reference sequence. The probes from the three additional probe sets would be identical to the corresponding probe from the first probe set except at the interrogation position, which occurs in the same position in each of the four corresponding probes from the four probe sets, and is occupied by a different nucleotide in the four probe sets. In the present analysis, probes were nucleotides long. Arrays tiled for multiple different references sequences were included on the same substrate.

[1036] Publicly available sequences for a given gene can be assembled into Gap4 (http://www biozentrum. unibas.ch/-biocomp/staden/Overview .html). PCR primers covering each exon, could be designed, for example, using Primer 3 (httP://www-genome.wi.mit.edu/cgi- bin/primer/primer3.cgi). Primers would not be designed in regions where there are sequence discrepancies between reads. Genomic DNA could be amplified from at least two individuals using 2.5 pmol each primer, 1.5 mM MgCl2, 100 ˜M dNTPs, 0.75 ˜M AmpliTaq GOLD polymerase, and about 19 ng DNA in a 15 ul reaction. Reactions could be assembled using a PACKARD MultiPROBE robotic pipetting station and then put in MJ 96-well tetrad thermocyclers (96° C. for minutes, followed by cycles of 96° C. for seconds, 59° C. for 2 minutes, and 72° C. for 2 minutes). A subset of the PCR assays for each individual could then be run on 3% NuSieve gels in 0.5X TBE to confirm that the reaction worked.

[1037] For a given DNA, 5 ul (about 50 ng) of each PCR or RT -PCR product could be pooled (Final volume=150-200 ul). The products can be purified using QiaQuick PCR purification from Qiagen. The samples would then be eluted once in 35 ul sterile water and 4 ul 1OX One-Phor-All buffer (Pharmacia). The pooled samples are then digested with 0.2 u DNaseI (Promega) for 10 minutes at 37° C. and then labeled with 0.5 nmols biotin-N6- ddATP and 15u Terminal Transferase (GibcoBRL Life Technology) for 60 minutes at 37° C. Both fragmentation and labeling reactions could be terminated by incubating the pooled sample for 15 minutes at 100° C.

[1038] Low-density DNA chips {Affymetrix, Calif.) may be hybridized following the manufacturer's instructions. Briefly, the hybridization cocktail consisted of 3M TMACI, mM Tris pH 7.8, 0.01% Triton X-100, 100 mg/ml herring sperm DNA {Gibco BRL), 200 pM control biotin-labeled oligo. The processed PCR products are then denatured for 7 minutes at 100° C. and then added to prewarmed {37° ‘C.) hybridization solution. The chips are hybridized overnight at 44° C. Chips are washed in 1X SSPET and 6X SSPET followed by staining with 2 ug/ml SARPE and 0.5 mg/ml acetylated BSA in 200 ul of 6X SSPET for 8 minutes at room temperature. Chips are scanned using a Molecular Dynamics scanner.

[1039] Chip image files may be analyzed using Ulysses {Affymetrix, Calif.) which uses four algorithms to identify potential polymorphisms. Candidate polymorphisms may be visually inspected and assigned a confidence value: where high confidence candidates display all three genotypes, while likely candidates show only two genotypes {homozygous for reference sequence and heterozygous for reference and variant). Some of the candidate polymorphisms may be confirmed by ABI sequencing. Identified polymorphisms could then be compared to several databases to determine if they are novel.

[1040] At least a subset of the single nucleotide polymorphisms of the present invention were identified using the methods above or otherwise described herein on DNA samples obtained from individuals participating in a Bristol-Myers Squibb (BMS) omapatrilat clinical study (see Table VIIA-D).

### Example 2

### Method Of Determining The Allele Frequency For Each SNP Of The Present Invention

[1041] Allele frequencies of these polymorphisms were determined by genotyping 40 Caucasian, 40 African American, 30 Asian, and 10 Amerindian DNA samples (Coriell Institute, Collingswood, N.J.; see Table VIIA-D) using FP-TDI assay (Chen X 1999). The ethnicity and Coriell Sample IDs for each of the DNA samples utilized for the present invention are provided in Table VIIA-D. Automated genotyping calls were made with an allele calling software developed by Joel Hirschom (Whitehead Institute/MIT Center for Genome Research, personal communication).

[1042] Briefly, the no template controls (NTCs) were labeled accordingly in column C. The appropriate cells were completed in column L indicating whether REF (homozygous ROX) or VAR (homozygous TAMRA) are expected to be rare genotypes (<10% of all samples)—the latter is important in helping the program to identify rare homozygotes. The number of 96 well plates genotyped in cell P2 are noted (generally between 0.5 and 4)—the program works best if this is accurate. No more than 384 samples can be analyzed at a time. The pairs of mP values from the LJL were pasted into columns E and F; making sure there were no residual data was left at the bottom fewer than 384 data points are provided. The DNA names were provided in columns A, B or C; column I will be a concatenation of columns A, B and C. In addition, the well numbers for each sample were also provided in column D.

[1043] With the above information provided, the program should automatically cluster the points and identify genotypes. The program works by converting the mP values into polar coordinates (distance from origin and angle from origin) with the angle being on a scale from 0 to 2; heterozygotes are placed as close to 1 as possible.

[1044] The cutoff values in columns L and M may be adjusted as desired.

[1045] Expert parameters: The most important parameters are the maximum angle for REF and minimum angle for VAR. These parameters may need to be changed in a particularly skewed assay which may be observed when an REF or VAR cluster is close to an angle of 1 and has called as a failed or HETs.

[1046] Other parameters are low and high cutoffs that are used to determine which points are considered for the determination of edges of the clusters. With small numbers of data points, the high cutoff may need to be increased (to 500 or so). This may be the right thing to do for every assay, but certainly when the program fails to identify a small cluster with high signal.

[1047] NTC TAMRA and ROX indicate the position of the no template control or failed samples as estimated by the computer algorithm.

[1048] No signal=mP< is the threshold below which points are automatically considered failures. “Throw out points with signal above” is the TAMRA or ROX mP value above which points are considered failures. The latter may occasionally need to be adjusted from 250 to 300, but caveat emptor for assays with signals >250. ‘Lump’ or 'split’ describes a subtle difference in the way points are grouped into clusters. Lump generally is better. ‘HETs expected’ in the rare case where only homozygotes of either class are expected (e.g. a study of X chromosome SNPs in males), change this to “N”.

[1049] Notes on method of clustering: The origin is defined by the NTCs or other low signal points (the position of the origin is shown as “NTC TAMRA” and “NTC ROX”); the points with very low or high signal are not considered initially. The program finds the point farthest from the origin and calls that a HET; the ROX/TAMRA ratio is calculated from this point, placing the heterozygotes at 45 degrees from the origin (an angle of “1”). The angles from the origin are calculated (the scale ranges from 0 to 2) and used to define clusters. A histogram of angles is generated. The cluster boundaries are defined by an algorithm that takes into account the shape of the histogram. The homozygote clusters are defined as the leftmost and rightmost big clusters (unless the allele is specified as being rare, in which case the cluster need not be big). The heterozygote is the biggest cluster in between the REF and VAR. If there are two equal clusters, the one best-separated from REF and VAR is called HET. All other clusters are failed. Some fine tuning is applied to lump in scattered points on the edges of the clusters (if “Lump” is selected). The boundaries of the clusters are “Angles” in column L.

[1050] Once the clusters are defined, the interquartile distance of signal intensity is defined for each cluster. Points falling more than 3 or 4 interquartiles from the mean are excluded. (These are the “Signal cutoffs” in column M)

[1051] For example, the allele frequency of the B1 receptor R317Q variant (AE103s1) was as follows. 7% in African Americans (7/94), 0% in Caucasians (0/94), 0% in Asians (0/60), and 0% in Amerindians (0/20). Higher frequency of this form in African Americans than in Caucasians matches the profile of a potential genetic risk factor for angioedema, which is observed more frequently in African Americans than in Caucasians (Brown N.J. 1996; Brown N.J. 1998; Agostoni A 1999; Coats 2000).

[1052] The invention encompasses additional methods of determining the allelic frequency of the SNPs of the present invention. Such methods may be known in the art, some of which are described elsewhere herein.

### Example 3

### Method Of Genotyping Each SNP Of The Present Invention

[1053] a.) Genomic DNA preparation

[1054] Genomic DNA samples for genotyping were prepared using the Purigene™ DNA extraction kit from Gentra Systems (http://www.gentra.com). After preparation, DNA samples were diluted to a 2 ng/ul working concentration with TE buffer (10 mM Tris-Cl, pH 8.0, 0.1 mM EDTA, pH 8.0) and stored in 1 ml 96 deep well plates (VWR) at −20 degrees until use.

[1055] Samples for genomic DNA preparation were obtained from the Coriell tissue sources described herein (Table VIIA-D), from patients participating in a Bristol-Myers Squibb (BMS) omapatrilat clinical study, or from other sources known in the art or otherwise described herein. The genomic DNA samples obtained from the Bristol-Myers Squibb (BMS) omapatrilat clinical study are as follows: AE100s24, AE100s25, AE100s26, AE100s27, AE100s28, AE100s29, AE100s30, AE103s10, AE103s11, AE103s12, AE103s13, AE103s14, AE104s30, AE104s31, AE104s32, AE104s33, AE104s34, AE104s35, AE104s36, AE110s10, AE110s11, AE110s12, AE106s8, AE106s9, AE109s8, and AE109s9. All of the other SNPs of the present invention were identified by analyzing the Coriell tissue sources described herein (Table VIIA-D).

[1056] b) Genotyping

[1057] The SNP genotyping reactions were performed using the SNPStream™ system (Orchid Biosience, Princeton, N.J.) based on genetic bit analysis (Nikiforov, T. et al, Nucleic Acids Res 22, 4167-4175 (1994)).

[1058] The regions including polymorphic sites were amplified by the polymerase chain reaction (PCR) using a pair of primers (OPERON Technologies), one of which was phosphorothioated. 6 ul PCR cocktail containing 1.0 ng/ul genomic DNA, 200 uM dNTPs, 0.5 uM forward PCR primer, 0.5 uM reverse PCR primer (phosphorothioated), 0.05 u/ul Platinum Taq DNA polymerase (LifeTechnologies), and 1.5 mM MgCl₂. The PCR primer pairs used for genotyping analysis are provided in Table X under the headings ‘ORCHID_LEFT’ (SEQ ID Nos: 1066 thru 1153) and ‘ORCHID_RIGHT’ (SEQ ID Nos: 1154 thru 1241). The PCR reaction was set up in 384-well plates (M J Research) using a MiniTrak liquid handling station (Packard Bioscience). The PCR primer sequences were selected from those provided in Table X herein, or any other primer as may otherwise be required. PCR thermocycling was performed under the following conditions in a MJ Research Tetrad machine: step I, 95 degrees for 2 min; step 2, 94 degrees for 30 min; step 3, 55 degrees for 2 min; step 4, 72 degrees for 30 sec; step 5, go back to step 2 for an additional 39 cycles; step 6, 72 degrees for 1 min; and step 7, 12 degrees indefinitely)

[1059] After thermocycling, the amplified samples were placed in the SNPStrea™ (Orchid Bioscience) machine, and automated genetic bit analysis (GBA) (Nikiforov, T. et al,supra) reaction was performed. The first step of this reaction was degradation of one of the strands of the PCR products by T7 gene 6 exonuclease to make them single-stranded. The strand containing phosphorothioated primer are resistant to T7 gene 6 nuclease, and were not degraded by this enzyme. After digestion, the single-stranded PCR products were subjected to an annealing step whereyby the single stranded PCR products were annealed to the GBA primer on a solid phase, and then subjected to the GBA reaction (single base extension) using dideoxy-NTPs labeled with biotin or fluorescein. The GBA primers used for single base extension are provided in Table X under the heading ‘ORCHID_SNPIT’ (SEQ ID Nos: 1242 thru 1329). Polynucleotide bases represented by an “N” in Table X represent bases that were substituted with a C3 linker (C3 spacer phosphoramidite) during synthesis of the primer. Such linkers may be obtained from Research Genetics, and Sigma-Genosys. The ‘ORCHID_SNPIT’ primers were obtained from Operon. Incorporation of these dideoxynucleotides into a GBA primer were detected by two color ELISA assay using anti-fluorescein alkaline phosphatase conjugate and anti-biotin horseradish peroxidase. Automated genotype calls were made by GenoPak software (Orchid Bioscience), before manual correction of automated calls were done upon inspection of the resulting allelogram of each SNP.

### Example 4

### Alternative Method Of Genotyping Each SNP Of The Present Invention

[1060] In addition to the method of genotyping described in Example 3, the skilled artisan could determine the genotype of the polymorphisms of the present invention using the below described alternative method. This method is referred to as the “GBS method” herein and may be performed as described in conjunction with the teaches described elsewhere herein.

[1061] Briefly, the direct analysis of the sequence of the polymorphisms of the present invention can be accomplished by DNA sequencing of PCR products corresponding to the same. PCR amplicons are designed to be in close proximity to the polymorphisms of the present invention using the Primer3 program. The M13_SEQUENCE1 “TGTAAAACGACGGCCAGT (SEQ ID NO:1572)” is prepended to each forward PCR primer (see Table VIII). The M13_SEQUENCE2 “CAGGAAACAGCTATGACC (SEQ ID NO: 1573)” is prepended to each reverse PCR primer (see Table VIII).

[1062] PCR amplification and purification are performed essentially the same as described in Example 1 herein.

[1063] PCR products are sequenced by the dye-terminator method using the M13_SEQUENCE1 and M13_SEQUENCE2 primers above. The genotype can be determined by analysis of the sequencing results at the polymorphic position.

### Example 5

### Statistical Analysis Of The Association Between The Angioedema Phenotype And The SNPs Of The Present Invention

[1064] The association between angioedema and the single nucleotide polymorphisms of the present invention were investigated by applying statistical analysis to the results of the genotyping assays described elsewhere herein. The central hypothesis of this analysis was that a predisposition to develop angioedema may be conferred by specific genomic factors. The analysis attempted to identify one or more of these factors in DNA samples from index cases and matched control subjects who were exposed to omapatrilat ([4S-[4.alpha.(R*), 7.alpha., 10a.beta.]]-octahydro-4-[(2-mercapto-1-oxo-3-phenylpropyl)amino]-5-oxo-7H- pyrido[2, 1-b] [1,3]thiazepine-7-carboxylic acid) in a Bristol-Myers Squibb (BMS) omapatrilat clinical study.

### Methods

[1065] Sample. Investigators in the BMS omapatrilat clinical trial diagnosed angioedema in some subjects. Head and neck edema, which shares some clinical features with angioedema, for example, lip swelling, was also identified in some subjects. One subject experienced angioedema and head and neck edema. For the purposes of statistical analysis, this individual was considered only as an angioedema case. In this study, “head and neck edema” is referred to as an “angioedema-like event”.

[1066] Prior to initiating this analysis, listings of index cases and matched controls were generated from subjects that participated in a Bristol-Myers Squibb omapatrilat clinical program. These listings pre-specified the population of subjects that were to be enrolled at the investigative sites. Case subjects who were previously exposed to omapatrilat and experienced angioedema or angioedema-like events were matched with control subjects who were exposed to omapatrilat but did not experience angioedema or angioedema-like events. Matched controls were identified for each index case based on nationality, race, gender, and starting dose of omapatrilat. Matching did not include other potential angioedema risk factors such as dose escalation, age, tobacco use and allergy history. To reduce the total number of sites to a manageable level, controls for Non-Black index cases were selected based on the matching criteria from those sites with an index case. Controls for Black index cases were selected based on the matching criteria from index case sites first and then only from sites associated with a trial in Black hypertensives.

[1067] The overall sample consisted of 215 subjects including 56 cases with at least one matched control for a total of 159 controls (Table XII). Race was self-reported as part of each subject's participation in the original omapatrilat phase II/III program. The overall sample included a mixture of races, including Blacks, Caucasians and Brazilian subjects. The Brazilian subjects self-reported Mulatto for race. These subjects are referred to as “Other” for race in this study. The statistical analyses described below were performed on the overall sample and four subgroups, including Blacks, Caucasians, Angioedema and Angioedema-like (Table XII). The Blacks subgroup included 21 angioedema and angioedema-like cases and 51 matched controls. The Caucasians subgroup included 34 angioedema and angioedema-like cases and 107 matched controls. The angioedema subgroup included a mixture of races for a total of 23 cases and 70 matched controls. The angioedema-like subgroup also included a mixture of races for a total of 33 cases and 89 matched controls.

[1068] Measures. Single nucleotide polymorphisms (SNPs) in angioedema-susceptibility candidate gene regions (Table XIII) were genotyped on all subjects essentially as described in Example 3 herein . The SNPs that were genotyped represented a sample of the polymorphic variation in each gene and were not exhaustive with regard to coverage of the total genetic variation that may be present in each gene. Specifically, only those SNPs referenced herein were genotyped and statistically analyzed, as described.

[1069] Statistical Analyses. Conditional logistic regression (HOSMER and LEMESHOW 2000) was used to examine the associations between genotypes of candidate angioedema susceptibility gene SNPs and the development of angioedema or angioedema-like events. All SNPs were bi-allelic with three possible genotypes. For each SNP, in the overall sample and each subgroup, allele frequencies were estimated. For consistency in SNP genotype parameter coding in the logistic regression models, the less frequent allele of each SNP was designated as the rare allele and the number of copies of that allele that each subject carried, either 0, 1, or 2, was then determined. Three possible genotypes for each SNP leaves two degrees of freedom for parameters in the conditional logistic regression model representing the information contained in these three genotype categories. Two dummy variables were therefore created based on the copies of the rare allele for each subject for use in the conditional logistic regression model,

[1070] x₁=1 if copies of rare allele=1, 0 otherwise and

[1071] x₂=1 if copies of rare allele=2, 0 otherwise.

[1072] The full conditional logistic regression model used was

$${π}_{k} ( x ) = \frac{{e}^{{α}_{k} + {β}_{1}^{{′}^{′}} {x}_{1} + {β}_{2}^{{′}^{′}} {x}_{2}}}{1 + {e}^{{α}_{k} + {β}_{1}^{{′}^{′}} {x}_{1} + {β}_{2}^{{′}^{′}} {x}_{2}}} ,$$

[1073] where x in πₖ(x) is the vector of dummy variables representing the SNP genotypes described above, k is the matching stratum index specific to each matched case-control set of subjects, πₖ(x) is the matching stratum-specific expected probability that a subject is a case given x, αₖ is the matching stratum-specific contribution to πₖ(x) of all the matching variables constant within the kth stratum and each β′ represents the contribution of the respective dummy variable to πₖ(x).

[1074] For each SNP, the null hypothesis was that the vector of β′ are all equal to 0 and was tested using the scores test (HOSMER and LEMESHOW 2000). The degrees of freedom for the scores test statistic was equal to one less than the number of genotypes. Exponentiation of each slope coefficient, β′, provided an estimate of the, ratio of the odds of an adverse event (angioedema and/or Angioedema-like) in subjects carrying the specified copies of the rare allele represented in the definition of the coefficient, relative to controls matched for nationality, race, gender and starting dose, over the odds of such an adverse event for similarly matched subjects not carrying any copies of the rare allele. 95% confidence interval limits were estimated for each odds ratio based on the standard error estimate of the respective slope coefficient.

[1075] The sample sizes for the subgroup analyses (angioedema, angioedema-like, Blacks, Caucasians) were small and unbalanced with regard to the distribution of individuals among SNP genotype classes. Unbalanced genotype numbers are expected in samples from human populations and were also observed for the overall sample. Furthermore, some SNP allele frequencies were very rare. In situations where many or all of these conditions existed, the asymptotic maximum likelihood methods used for parameter estimation with conventional conditional logistic regression may not be reliable and, for SNPs with extreme genotype distributions resulting in zero cells, it was impossible to obtain parameter estimates using these methods. Exact conditional logistic regression was used to supplement the asymptotic methods described above to deal with these estimation problems whenever computationally necessary and feasible (MEHTA and PATEL 1995). LogXact-4® for Windows software was used for all the asymptotic and exact conditional logistic regression parameter estimates (Mehta and Patel 2000).

[1076] Results

[1077] The significant associations of SNPs with angioedema and/or angioedema like events are presented in Table XIV. Since the SNP coverage within each gene was not exhaustive of the genetic variation that may be present and possibly related to event susceptibility in each gene, inferences about these SNP associations with angioedema and/or angioedema-like events for each gene, are therefore related to the hypothesis that genetic variation in that gene may be involved in susceptibility to such events.

[1078] The utility, in general, of each of these significant SNP-angioedema and/or angioedema-like event associations is that they suggest (1) such SNPs may be causally involved, alone or in combination with other SNPs in the respective gene regions with susceptibility to angioedema and/or angioedema-like events resulting from exposure to a neutral endopeptidase (NEP) inhibitor and/or an angiotensin converting enzyme (ACE) inhibitor; (2) such SNPs, if not directly causally involved, are reflective of an association because of linkage disequilibrium with one or more other SNPs that may be causally involved, alone or in combination with other SNPs in the respective gene regions with susceptibility to angioedema and/or angioedema-like events resulting from exposure to a neutral endopeptidase (NEP) inhibitor and/or an angiotensin converting enzyme (ACE) inhibitor; (3) such SNPs may be useful in establishing haplotypes that may be used to narrow the search for and identify polymorphisms or combinations of polymorphisms that may be causally, alone or in combination with other SNPs in the respective gene regions with susceptibility to angioedema and/or angioedema-like events resulting from exposure to a neutral endopeptidase (NEP) inhibitor and/or an angiotensin converting enzyme (ACE) inhibitor; and (4) such SNPs, if used to establish haplotypes that are identified as causally involved in such event susceptibility, may be used to predict which subjects are most likely to experience such events when exposed to a neutral endopeptidase (NEP) inhibitor and/or an angiotensin converting enzyme (ACE) inhibitor. The term “respective gene regions” shall be construed to refer to those regions of each gene which have been used to identify the SNPs of the present invention.

[1079] Although the association to the angioedema phenotype has been demonstrated herein for less than all of the SNPs of the present invention, at least one or more remaining SNPs have shown an association to the angioedema phenotype using the methods essentially as described herein. Such associations are encompassed by the present invention. Moreover, the use of such SNPs for which an association to the angioedema phenotype has either been established or not established are encompassed by the present invention for use in establishing hapotypes to predict which subjects are most likely to experience such events when exposed to a neutral endopeptidase (NEP) inhibitor and/or an angiotensin converting enzyme (ACE) inhibitor.

[1080] References:

[1081] HOSMER, D. W., and S. LEMESHOW, 2000 Applied logistic regression. John Wiley & Sons, New York.

[1082] MEHTA, C., and N. PATEL, 2000 LogXact-4® for Windows, pp. Cytel Software Corporation, Cambridge.

[1083] MEHTA, C. R., and N. R. PATEL, 1995 Exact logistic regression: theory and examples. Stat Med 14: 2143-60.

### Example 6

### Method of Isolating the Native Forms of the Andioedema Candidate Genes

[1084] A number of methods have been described in the art that may be utilized in isolating the native forms of the andioedema candidate genes. Specific methods for each gene are referenced below and which are hereby incorporated by reference herein in their entireties. The artisan, skilled in the molecular biology arts, would be able to isolate these native forms based upon the methods and information contained, and/or referenced, therein.

### Aminopeptidase P (HGNC_ID: XPNPEP2)

[1085] 1) Venema, R. C., et al., Biochim Biophys Acta 1997 Oct 9;1354(1):45-8 Cloning and tissue distribution of human membrane-bound aminopeptidase P.

[1086] 2) Cottrell, G. S., et al., Biochem Soc Trans 1998 Aug;26(3):S248 The cloning and functional expression of human pancreatic aminopeptidase P.

[1087] 3) Sprinkle, T. J., et al., Genomics 1998 May 15;50(1):114-6 Assignment of the membrane-bound human aminopeptidase P gene (XPNPEP2) to chromosome Xq25.

### Bradykinin B1 Receptor (HGNC_ID: BDKRB1)

[1088] 1) Menke, J. G., et al., J Biol Chem 1994 Aug 26;269(34):21583-6 Expression cloning of a human B1 bradykinin receptor.

[1089] 2) Chai, K. X., et al., Genomics 1996 Jan 1;31(1):51-7 Genomic DNA sequence, expression, and chromosomal localization of the human B1 bradykinin receptor gene BDKRB1.

[1090] 3) Bachvarov, D. R., et al., Genomics 1996 May 1;33(3):374-81 Structure and genomic organization of the human B1 receptor gene for kinins (BDKRB1).

[1091] 4) Yang X, and Polgar P., Biochem Biophys Res Commun 1996 May 24;222(3):718-25 Genomic structure of the human bradykinin B1 receptor gene and preliminary characterization of its regulatory regions.

### Bradykinin B2 receptor (HGNC_ID: BDKRB2)

[1092] 1) Hess, J. F., et al., Biochem Biophys Res Commun 1992 Apr 15;184(1):260-8 Cloning and pharmacological characterization of a human bradykinin (BK-2) receptor.

[1093] 2) Eggerickx, D., et al., Biochem Biophys Res Commun 1992 Sep 30;187(3):1306-13 Molecular cloning, functional expression and pharmacological characterization of a human bradykinin B2 receptor gene.

[1094] 3) Powell, S. J., et al., Genomics 1993 Feb;15(2):435-8 Human bradykinin B2 receptor: nucleotide sequence analysis and assignment to chromosome 14.

[1095] 4) McIntyre, P., et al., Mol Pharmacol 1993 Aug;44(2):346-55 Published erratum appears in Mol Pharmacol 1994 Mar;45(3):561

### C1 Esterase Inhibitor (HGNC_ID: C1NH)

[1096] 1) Bock, S. C., et al., Biochemistry 1986 Jul 29;25(15):4292-301 Human C1 inhibitor: primary structure, cDNA cloning, and chromosomal localization.

[1097] 2) Tosi, M., et al., Gene 1986;42(3):265-72 Molecular cloning of human C1 inhibitor: sequence homologies with alpha 1-antitrypsin and other members of the serpins superfamily.

[1098] 3) Davis, A. E., 3d, et al., Proc Natl Acad Sci U S A 1986 May;83(10):3161-5 Human inhibitor of the first component of complement, Cl:characterization of cDNA clones and localization of the gene to chromosome 11.

[1099] 4) Carter, P. E., et al., Eur J Biochem 1988 Apr 5; 173(1):163-9 Genomic and cDNA cloning of the human C1 inhibitor. Intron-exon junctions and comparison with other serpins.

[1100] 5 Carter, P. E., et al., Eur J Biochem 1991 Apr 23;197(2):301-8 Complete nucleotide sequence of the gene for human C1 inhibitor with an unusually high density of Alu elements.

### Tachykinin Receptor 1 (HGNC_ID: TACR1)

[1101] 1) Takeda, Y., et al., Biochem Biophys Res Commun 1991 Sep 30;179(3):1232-40 Molecular cloning, structural characterization and functional expression of the human substance P receptor.

[1102] 2) Hopkins, B., et al., Biochem Biophys Res Commun 1991 Oct 31; 180(2):1110-7 Published erratum appears in Biochem Biophys Res Commun 1992 Feb14;182(3): 1514 Isolation and characterisation of the human lung NK- 1 receptor cDNA.

[1103] 3) Gerard, N. P., et al., Biochemistry 1991 Nov 5;30(44):10640-6 Human substance P receptor (NK-1): organization of the gene, chromosome localization, and functional expression of cDNA clones.

### Kallikrein 1 (HGNC_ID: KLK1).

[1104] 1) Fukushima, D., et al., Biochemistry 1985 Dec 31;24(27):8037-43 Nucleotide sequence of cloned cDNA for human pancreatic kallikrein.

[1105] 2.) Evans, B. A., et al., Biochemistry 1988 May 3;27(9):3124-9 Structure and chromosomal localization of the human renal kallikrein gene.

[1106] 3) Angermann, A., et al., Biochem J 1989 Sep 15;262(3):787-93 Cloning and expression of human salivary-gland kallikrein in Escherichia coli.

### Angiotension Converting Enzyme 2 (HGNC ID:ACE2).

[1107] 1.) Tipnis S R, Hooper N M, Hyde R, Karran E, Christie G, Turner A J, J Biol Chem 2000 Oct 27;275(43):33238-43

[1108] 2.) Donoghue M, Hsieh F, Baronas E, Godbout K, Gosselin M, Stagliano N, Donovan M, Woolf B, Robison K, Jeyaseelan R, Breitbart R E, Acton S Circ Res 2000 Sep 1;87(5):E1-9

### Protease Inhibitor 4 (HGNC_ID: P14 and/or SERPINA4).

[1109] 1.) Chai K X, Chen L M, Chao J, Chao L, J Biol Chem 1993 Nov 15;268(32):24498-505

[1110] 2.) Chai K X, Ward D C, Chao J, Chao L Genomics 1994 Sep 15;23(2):370-8

### Example 7

### Method Of Isolating The Novel Polymorphic Forms Of The Andioedema Candidate Genes Of The Present Invention

[1111] Since the novel allelic genes of the present invention represent genes present within at least a subset of the human population, these genes may be isolated using the methods provided in Example 3 above. For example, the source DNA used to isolate the novel allelic gene may be obtained through a random sampling of the human population and repeated until the allelic form of the gene is obtained. Preferably, random samples of source DNA from the human population are screened using the SNPs and methods of the present invention to identify those sources that comprise the allelic form of the gene. Once identified, such a source may be used to isolate the allelic form of the gene(s). The invention encompasses the isolation of such allelic genes from both genomic and/or cDNA libraries created from such source(s).

[1112] In reference to the specific methods provided in Example 3 above, it is expected that isolating the andioedema candidate genes would be within the skill of an artisan trained in the molecular biology arts. Nonetheless, a detailed exemplary method of isolating at least one of the bradykinin associated genes, in this case the variant form (R317Q) of Bradykinin B1 receptor cDNA (SNP_ID=AE103s1) is provided. Briefly,

[1113] First, the individuals with the R317Q variation are identified by genotyping the genomic DNA samples using the FP-SBE (Chen X 1999) method, described in Example 1 and 2 above. DNA samples publicly available from the Coriell Institute (Collingswood, N.J.) are used (e.g., the Coriell Sample IDs provided in Table VII herein). Oligonucleotide primers that were used for this genotyping assay are as follows.

[1114] BDKRB1.L: 5′-gccaacttctttgccttcac-3′ (PCR forward primer)

[1115] BDKRB1.R: 5′-cgccagaaaagttggaagat-3′ (PCR reverse primer)

[1116] BDKRB1 P1: 5 ′- cagtaatttatgtctttgtgggcc-3′ (SBE primer)

[1117] By analyzing 48 African American genomic DNA samples, we identified six individuals (Coriell Sample IDs: 14746, 14754, 14755, 14837, 14681, and 07554C) with the R317Q form of bradykinin B1 receptor. Next, Lymphoblastoid cell lines from these individuals may be obtained from the Coriell Institute. These cells can be grown in RPM1-1640 medium with L-glutamine plus 10% FCS at 37degrees. PolyA+RNA are then isolated from these cells using Oligotex Direct Kit (Life Technologies).

[1118] First strand cDNA (complementary DNA) is produced using Superscript Preamplification System for First Strand cDNA Synthesis (Life Technologies, Cat No 18089-011) using these polyA+RNA as templates, as specified in the users manual which is hereby incorporated herein by reference in its entirety. Specific cDNA encoding B1 bradykinin receptor is amplified by polymerase chain reaction (PCR) using a forward primer which hybridizes to the 5′-UTR region, a reverse primer which hybridizes to the 3′-UTR region, and these first strand cDNA as templates (Sambrook, Fritsch et al. 1989). For example, the primers specified in Tables VIII and IX may be used. Alternatively, these primers may be designed using Primer3 program (Rozen S 2000). Restriction enzyme sites (example: SaII for the forward primer, and NotI for reverse primer) are added to the 5′-end of these primer sequences to facilitate cloning into expression vectors after PCR amplification. PCR amplification may be performed essentially as described in the owner's manual of the Expand Long Template PCR System (Roche Molecular Biochemicals) following manufacturer's standard protocol, which is hereby incorporated herein by reference in its entirety.

[1119] PCR amplification products are digested with restriction enzymes (such as SalI and NotI, for example) and ligated with expression vector DNA cut with the same set of restriction enzymes. pSPORT (Invitrogen) is one example of such an expression vector. After ligated DNA is introduced into E. coli cells (Sambrook, Fritsch et al. 1989), plasmid DNA is isolated from these bacterial cells. This plasmid DNA is sequenced to confirm the presence an intact (full-length) coding region of the human B1 bradykinin receptor with R317Q variation using methods well known in the art and described elsewhere herein.

[1120] The skilled artisan would appreciate that the above method may be applied to isolating the other novel polymorphic bradykinin associated genes of the present invention through the simple subsitution of applicable PCR and sequencing primers. Such primers may be selected from any one of the applicable primers provided in Tables VIII and/or IX, or may be designed using the Primer3 program (Rozen S 2000) as described. Such primers may preferably comprise at least a portion of any one of the polynucleotide sequences of the present invention.

### Example 8

### Method Of Engineering The Novel Forms Of The Andioedema Candidate Genes Of The Present Invention

[1121] Aside from isolating the novel allelic genes of the present invention from DNA samples obtained from the human population and/or the Coriell Institute, as described in Example 4 above, the invention also encompasses methods of engineering the novel allelic genes of the present invention through the application of site-directed mutagenesis to the isolated native forms of the genes. Such methodology could be applied to synthesize allelic forms of the genes comprising at least one, or more, of the encoding SNPs of the present invention (e.g., silent, missense)—preferably at least 1, 2, 3, or 4 encoding SNPs for each gene.

[1122] In reference to the specific methods provided in Example 4 above, it is expected that isolating the novel polymorphic andioedema candidate genes of the present invention would be within the skill of an artisan trained in the molecular biology arts. Nonetheless, a detailed exemplary method of engineering at least one of the bradykinin associated genes to comprise the encoding and/or non-coding polymorphic nucleic acid sequence, in this case the variant form (R317Q) of Bradykinin B1 receptor cDNA (SNP_ID=AE103s1) is provided. Briefly,

[1123] cDNA clones encoding the human bradykinin B1 receptor may be identified by homology searches with the BLASTN program (Altschul SF 1990) against the Genbank non-redundant nucleotide sequence database using the published human bradykinin B1 receptor cDNA sequence (GenBank Accession No.: NM_{—}000710). Four examples of publicly available human bradykinin B1 receptor cDNA clones discovered in this search are IMAGE_{—}3209286 (Research Genetics), IMAGE_{—}1472696 (Research Genetics)(Lennon G 1996), ATCC_{—}581873 (ATCC), and ATCC_{—}3033151 (ATCC). After obtaining these clones, they are sequenced to confirm the validity of the DNA sequences.

[1124] Once these clones are confirmed to contain the intact wild type cDNA sequence of bradykinin B1 receptor coding region, the R317Q polymorphism (mutation) may be introduced into the native sequence using PCR directed in vitro mutagenesis (Cormack 2000). In this method, synthetic oligonucleotides are designed to incorporate a point mutation at one end of an amplified fragment. Following PCR, the amplified fragments are made blunt-ended by treatment with Klenow Fragment. These fragments are then ligated and subcloned into a vector to facilitate sequence analysis. This method consists of the following steps.

[1125] 1. Subcloning of cDNA insert into a high copy plasmid vector containing multiple cloning sites and M13 flanking sequences, such as pUC19 (Sambrook, Fritsch et al. 1989), in the forward orientation. The skilled artisan would appreciate that other plasmids could be equally substituted, and may be desirable in certain circumstances.

[1126] 2. Introduction of a mutation by PCR amplification of the cDNA region downstream of the mutation site using a primer including the mutation. (FIG. 8.5.2 in (Cormack 2000)). In the case of introducing the R317Q mutation into the human bradykinin B1 receptor, the following two primers may be used.

[1127] M13 reverse sequencing primer: 5′-AGCGGATAACAATTTCACACAGGA-3′ (SEQ ID NO:549).

[1128] Mutation primer: 5′- pAGCTCTTCAGGACCAAGGTCT-3′ (SEQ ID NO:550).

[1129] Mutation primer contains the mutation (R317Q) at the 5′ end and its downstream flanking sequence. M13 reverse sequencing primer hybridizes to the pUC19 vector. Subcloned cDNA comprising the human bradykinin B1 receptor is used as a template (described in Step 1). A 100 ul PCR reaction mixture is prepared using 10 ng of the template DNA, 200 uM 4dNTPs, 1 uM primers, 0.25U Taq DNA polymerase (PE), and standard Taq DNA polymerase buffer. Typical PCR cycling condition are as follows:

TABLE XI

| | | |
|---|---|---|
| 20-25 | cycles: | 45 sec, 93 degrees |
| | | 2 min, 50 degrees |
| | | 2 min, 72 degrees |
| 1 | cycle: | 10 min, 72 degrees |

[1130] After the final extension step of PCR, 5U Kienow Fragment is added and incubated for 15 min at 30 degrees. The PCR product is then digested with the restriction enzyme, EcoRI.

[1131] 3. PCR amplification of the upstream region is then performed, using subcloned cDNA as a template (the product of Step 1). This PCR is done using the following two primers:

[1132] M13 forward sequencing primer: 5′-CGCCAGGGTTTTCCCAGTCACGAC-3′ (SEQ ID NO:551).

[1133] Flanking primer: 5′-pGGCCCACAAAGACATAAATT-3′ (SEQ ID NO:552).

[1134] Flanking primer is complimentary to the upstream flanking sequence of the R317Q mutation. M13 forward sequencing primer hybridizes to the pUC19 vector. PCR conditions and Klenow treatments follow the same procedures as provided in Step 2, above. The PCR product is then digested with the restriction enzyme, HindIII.

[1135] 4. Prepare the pUC19 vector for cloning the cDNA comprising the polymorphic site. Digest pUC19 plasmid DNA with EcoRI and HindII. The resulting digested vector fragment may then be purified using techniques well known in the art, such as gel purification, for example.

[1136] 5. Combine the products from Step 2 (PCR product containing mutation), Step 3 (PCR product containing the upstream region), and Step 4 (digested vector), and ligate them together using standard blunt-end ligation conditions (Sambrook, Fritsch et al. 1989).

[1137] 6. Transform the resulting recombinant plasmid from Step 5 into E. coli competent cells using methods known in the art, such as, for example, the transformation methods described in Sambrook, Fritsch et al. 1989.

[1138] 7. Analyze the amplified fragment portion of the plasmid DNA by DNA sequencing to confirm the point mutation, and absence of any other mutations introduced during PCR. The method of sequencing the insert DNA, including the primers utilized, are described herein or are otherwise known in the art.

[1139] The skilled artisan would appreciate that the above method may be applied to engineering the other novel polymorphic bradykinin associated genes of the present invention through the simple subsitution of applicable mutation, flanking, PCR, and sequencing primers for each specific gene and/or polymorphism. Some of these primers may be selected from any one of the applicable primers provided in Tables VIII and/or IX, may be designed using the Primer3 program (Rozen S 2000), or designed manually, as described. Such primers may preferably comprise at least a portion of any one of the polynucleotide sequences of the present invention.

[1140] Moreover, the skilled artisan would appreciate that the above method may be applied to engineering more than one polymorphic nucleic acid sequence of the present invention into the novel polymorphic bradykinin associated genes of the present invention. For example, the Bradykinin receptor B1 cDNA could be engineered to comprise the G956A encoding polymorphism (SNP_ID:AE103s1), or the T129C encoding polymorphism (SNP_ID: AE103s2), or engineered to comprise both the G956A and T129C polymorphisms. Such an engineered gene could be created through succesive rounds of site-directed mutagenesis, as described in Steps 1 thru 7 above, or consolidated into a single round of mutagenesis. For example, Step 2 above could be performed for each mutation, then the products of both mutation amplifications could be combined with the product of Step 3 and 4, and the procedure followed as described.

### Example 9

### Alternative Methods of Detecting Polymorphisms Encompassed By The Present Invention

### A. Preparation of Samples

[1141] Polymorphisms are detected in a target nucleic acid from an individual being analyzed. For assay of genomic DNA, virtually any biological sample (other than pure red blood cells) is suitable. For example, convenient tissue samples include whole blood, semen, saliva, tears, urine, fecal material, sweat, buccal, skin and hair. For assay of cDNA or mRNA, the tissue sample must be obtained from an organ in which the target nucleic acid is expressed. For example, if the target nucleic acid is a cytochrome P450, the liver is a suitable source.

[1142] Many of the methods described below require amplification of DNA from target samples. This can be accomplished by e.g., PCR. See generally PCR Technology: Principles and Applications for DNA Amplification (ed. H. A. Erlich, Freeman Press, NY, N.Y., 1992); PCR Protocols: A Guide to Methods and Applications (eds. Innis, et al., Academic Press, San Diego, Calif., 1990); Mattila et al., Nucleic Acids Res. 19, 4967 (1991); Eckert et al., PCR Methods and Applications 1, (1991); PCR (eds. McPherson et al., IRL Press, Oxford); and U.S. Pat. No. 4,683,202.

[1143] Other suitable amplification methods include the ligase chain reaction (LCR) (see Wu and Wallace, Genomics 4:560 (1989), Landegren et al., Science 241:1077 (1988), transcription amplification (Kwoh et al., Proc. Natl. Acad. Sci. USA 86, 1173 (1989), and self-sustained sequence replication (Guatelli et al., Proc. Nat. Acad. Sci. USA, 87:1874 (1990)) and nucleic acid based sequence amplification (NASBA). The latter two amplification methods involve isothermal reactions based on isothermal transcription, which produce both single stranded RNA (ssRNA) and double stranded DNA (dsDNA) as the amplification products in a ratio of about 30 or 100 to 1, respectively.

[1144] Additional methods of amplification are known in the art or are described elsewhere herein.

### B. Detection of Polymorphisms in Target DNA

[1145] There are two distinct types of analysis of target DNA for detecting polymorphisms. The first type of analysis, sometimes referred to as de novo characterization, is carried out to identify polymorphic sites not previously characterized (i.e., to identify new polymorphisms). This analysis compares target sequences in different individuals to identify points of variation, i.e., polymorphic sites. By analyzing groups of individuals representing the greatest ethnic diversity among humans and greatest breed and species variety in plants and animals, patterns characteristic of the most common alleles/haplotypes of the locus can be identified, and the frequencies of such alleles/haplotypes in the population can be determined. Additional allelic frequencies can be determined for subpopulations characterized by criteria such as geography, race, or gender. The de novo identification of polymorphisms of the invention is described in the Examples section.

[1146] The second type of analysis determines which form(s) of a characterized (known) polymorphism are present in individuals under test. Additional methods of analysis are known in the art or are described elsewhere herein.

[1147] 1. Allele-Specific Probes

[1148] The design and use of allele-specific probes for analyzing polymorphisms is described by e.g., Saiki et al., Nature 324,163-166 (1986); Dattagupta, EP 235,726, Saiki, WO 89/11548. Allele-specific probes can be designed that hybridize to a segment of target DNA from one individual but do not hybridize to the corresponding segment from another individual due to the presence of different polymorphic forms in the respective segments from the two individuals. Hybridization conditions should be sufficiently stringent that there is a significant difference in hybridization intensity between alleles, and preferably an essentially binary response, whereby a probe hybridizes to only one of the alleles. Some probes are designed to hybridize to a segment of target DNA such that the polymorphic site aligns with a central position (e.g., in a 15-mer at the 7 position; in a 16-mer, at either the 8 or 9 position) of the probe. This design of probe achieves good discrimination in hybridization between different allelic forms.

[1149] Allele-specific probes are often used in pairs, one member of a pair showing a perfect match to a reference form of a target sequence and the other member showing a perfect match to a variant form. Several pairs of probes can then be immobilized on the same support for simultaneous analysis of multiple polymorphisms within the same target sequence.

[1150] 2. Tiling Arrays

[1151] The polymorphisms can also be identified by hybridization to nucleic acid arrays, some examples of which are described in WO 95/11995. The same arrays or different arrays can be used for analysis of characterized polymorphisms. -WO 95/11995 also describes sub arrays that are optimized for detection of a variant form of a precharacterized polymorphism. Such a sub array contains probes designed to be complementary to a second reference sequence, which is an allelic variant of the first reference sequence. The second group of probes is designed by the same principles as described, except that the probes exhibit complementarity to the second reference sequence. The inclusion of a second group (or further groups) can be particularly useful for analyzing short subsequences of the primary reference sequence in which multiple mutations are expected to occur within a short distance commensurate with the length of the probes (e.g., two or more mutations within 9 to bases).

[1152] 3. Allele-Specific Primers

[1153] An allele-specific primer hybridizes to a site on target DNA overlapping a polymorphism and only primes amplification of an allelic form to which the primer exhibits perfect complementarity. See Gibbs, Nucleic Acid Res. 17,2427-2448 (1989). This primer is used in conjunction with a second primer which hybridizes at a distal site. Amplification proceeds from the two primers, resulting in a detectable product which indicates the particular allelic form is present. A control is usually performed with a second pair of primers, one of which shows a single base mismatch at the polymorphic site and the other of which exhibits perfect complementarity to a distal site. The single-base mismatch prevents amplification and no detectable product is formed. The method works best when the mismatch is included in the 3′-most position of the oligonucleotide aligned with the polymorphism because this position is most destabilizing elongation from the primer (see, e.g., WO 93/22456).

[1154] 4. Direct-Sequencing

[1155] The direct analysis of the sequence of polymorphisms of the present invention can be accomplished using either the dideoxy chain termination method or the Maxam-Gilbert method (see Sambrook et al., Molecular Cloning, A Laboratory Manual (2nd Ed., CSHP, New York 1989); Zyskind et al., Recombinant DNA Laboratory Manual, (Acad. Press, 1988)).

[1156] 5. Denaturing Gradient Gel Electrophoresis

[1157] Amplification products generated using the polymerase chain reaction can be analyzed by the use of denaturing gradient gel electrophoresis. Different alleles can be identified based on the different sequence-dependent melting properties and electrophoretic migration of DNA in solution. Erlich, ed., PCR Technology. Principles and Applications for DNA Amplification, (W. H. Freeman and Co, New York, 1992), Chapter 7.

[1158] 6. Single-Strand Conformation Polymorphism Analysis

[1159] Alleles of target sequences can be differentiated using single-strand conformation polymorphism analysis, which identifies base differences by alteration in electrophoretic migration of single stranded PCR products, as described in Orita et al., Proc. Nat. Acad. Sci. 86,2766-2770 (1989). Amplified PCR products can be generated as described above, and heated or otherwise denatured, to form single stranded amplification products. Single-stranded nucleic acids may refold or form secondary structures which are partially dependent on the base sequence. The different electrophoretic mobilities of single-stranded amplification products can be related to base-sequence differences between alleles of target sequences.

[1160] 7. Single Base Extension

[1161] An alternative method for identifying and analyzing polymorphisms is based on single-base extension (SBE) of a fluorescently-labeled primer coupled with fluorescence resonance energy transfer (FRET) between the label of the added base and the label of the primer. Typically, the method, such as that described by Chen et al., (PNAS 94:10756-61 (1997), uses a locus-specific oligonucleotide primer labeled on the 5′ terminus with 5-carboxyfluorescein (F AM). This labeled primer is designed so that the 3′ end is immediately adjacent to the polymorphic site of interest. The labeled primer is hybridized to the locus, and single base extension of the labeled primer is performed with fluorescently-labeled dideoxyribonucleotides (ddNTPs) in dye-terminator sequencing fashion. An increase in fluorescence of the added ddNTP in response to excitation at the wavelength of the labeled primer is used to infer the identity of the added nucleotide.

### Example 10

### Method Of Assessing The Ability Of The Andioedema Candidate Genes Of The Present Invention To Serve As A GPCR Receptor

[1162] The activity of the the andioedema candidate gene polypeptides of the present invention, specifically the bradykinin B1 receptor, the bradykinin B2 receptor, and the NK1 tachykinin receptor allelic variants of the present invention, may be measured using an assay based upon the property of some known GPCRs to support proliferation in vitro of fibroblasts and tumor cells under serum-free conditions (Chiquet Ehrismann, R. et al. (1986) Cell 47: 131-139). Briefly, wells in 96 well cluster plates (Falcon, Fisher Scientific, Santa Clara Calif.) are coated with the bradykinin B1 receptor, the bradykinin B2 receptor, or the NK1 tachykinin receptor allelic variant polypeptides of the present invention by incubation with solutions at 50-100 Rg/ml for 15 min at ambient temperature. The coating solution is aspirated, and the wells washed with Dulbecco's medium before cells are plated. Rat fibroblast cultures or rat mammary tumor cells are prepared as described and plated at a density of 104-105 cells/ml in Dulbecco's medium supplemented with 10% fetal calf serum (FCS).

[1163] After three days the media are removed, and the cells washed three times with phosphate buffered saline (PBS) before the addition of serum-free Dulbecco's medium containing 0.25 mg/ml bovine serum albumin (BSA, Fraction V, Sigma Chemical, St. Louis, Mo.). After 2 days the medium is aspirated, and 100 il of [3H] thymidine (NEN) at 2 IICi/ml in fresh Dulbecco's medium containing 0.25 mg/ml BSA added. Parallel plates are fixed and stained to determine cell numbers. After 16 hr, the medium is aspirated, the cell layer washed with PBS, and the 10% trichloroacetic acid-precipitable counts in the cell layer determined by liquid scintillation counting of radioisotope (normalized to relative cell numbers; Chiquet-Ehrismann, R. et al. (1986) supra). The rates of cell proliferation and [3H] thymidine uptake are proportional to the levels of GCRP in the sample.

[1164] Alternatively, the assay for the bradykinin B1 receptor, the bradykinin B2 receptor, or the NKl tachykinin receptor allelic variant polypeptide activity is based upon the property of CD97/Emrl GPCR family proteins to modulate G protein-activated second messenger signal transduction pathways (e. g., cAMP; Gaudin, P. et al. (1998) J. Biol. Chem... 273: 4990-4996). A plasmid encoding the full length bradykinin B1 receptor, the bradykinin B2 receptor, or the NK1 tachykinin receptor allelic variant polypeptide is transfected into a mammalian cell line (e. g., COS-7 or Chinese hamster ovary (CHO-K1) cell lines) using methods well-known in the art. Transfected cells are grown in 12-well trays in culture medium containing 2% FCS for 48 hours, the culture medium is discarded, then the attached cells are gently washed with PBS. The cells are then incubated in culture medium with 10% FCS or 2% FCS for 30 minutes, then the medium is removed and cells lysed by treatment with 1 M perchloric acid. The cAMP levels in the lysate are measured by radioimmunoassay using methods well-known in the art. Changes in the levels of cAMP in the lysate from 10% FCS-treated cells compared with those in 2% FCS-treated cells are proportional to the amount of the bradykinin B1 receptor, the bradykinin B2 receptor, or the NK1 tachykinin receptor allelic variant polypeptide present in the transfected cells.

### Example 11

### Bacterial Expression Of A Polypeptide

[1165] A polynucleotide encoding a polypeptide of the present invention is amplified using PCR oligonucleotide primers corresponding to the 5′ and 3′ ends of the DNA sequence, as outlined in the Examples above or otherwise known in the art, to synthesize insertion fragments. The primers used to amplify the cDNA insert should preferably contain restriction sites, such as BamHI and XbaI, at the 5′ end of the primers in order to clone the amplified product into the expression vector. For example, BamHI and XbaI correspond to the restriction enzyme sites on the bacterial expression vector pQE-9. (Qiagen, Inc., Chatsworth, Calif.). This plasmid vector encodes antibiotic resistance (Ampr), a bacterial origin of replication (ori), an IPTG-regulatable promoter/operator (P/O), a ribosome binding site (RBS), a 6-histidine tag (6-His), and restriction enzyme cloning sites.

[1166] The pQE-9 vector is digested with BamHI and XbaI and the amplified fragment is ligated into the pQE-9 vector maintaining the reading frame initiated at the bacterial RBS. The ligation mixture is then used to transform the E. coli strain M15/rep4 (Qiagen, Inc.) which contains multiple copies of the plasmid pREP4, that expresses the lacI repressor and also confers kanamycin resistance (Kanr). Transformants are identified by their ability to grow on LB plates and ampicillin/kanamycin resistant colonies are selected. Plasmid DNA is isolated and confirmed by restriction analysis.

[1167] Clones containing the desired constructs are grown overnight (O/N) in liquid culture in LB media supplemented with both Amp (100 ug/ml) and Kan (25 ug/ml). The O/N culture is used to inoculate a large culture at a ratio of 1:100 to 1:250. The cells are grown to an optical density 600 (O.D.600) of between 0.4 and 0.6. IPTG (Isopropyl-B-D-thiogalacto pyranoside) is then added to a final concentration of 1 mM. IPTG induces by inactivating the lacd repressor, clearing the P/O leading to increased gene expression.

[1168] Cells are grown for an extra 3 to 4 hours. Cells are then harvested by centrifugation (20 mins at 6000 Xg). The cell pellet is solubilized in the chaotropic agent 6 Molar Guanidine HCl by stirring for 3-4 hours at 4 degree C. The cell debris is removed by centrifugation, and the supernatant containing the polypeptide is loaded onto a nickel-nitrilo-tri-acetic acid (“Ni-NTA”) affinity resin column (available from QIAGEN, Inc., supra). Proteins with a 6 x His tag bind to the Ni-NTA resin with high affinity and can be purified in a simple one-step procedure (for details see: The QIAexpressionist (1995) QIAGEN, Inc., supra).

[1169] Briefly, the supernatant is loaded onto the column in 6 M guanidine-HCl, pH 8, the column is first washed with 10 volumes of 6 M guanidine-HCl, pH 8, then washed with 10 volumes of 6 M guanidine-HCl pH 6, and finally the polypeptide is eluted with 6 M guanidine-HCl, pH 5.

[1170] The purified protein is then renatured by dialyzing it against phosphate-buffered saline (PBS) or 50 mM Na-acetate, pH 6 buffer plus 200 mM NaCl. Alternatively, the protein can be successfully refolded while immobilized on the Ni-NTA column. The recommended conditions are as follows: renature using a linear 6M-1M urea gradient in 500 mM NaCl, 20% glycerol, 20 mM Tris/HCl pH 7.4, containing protease inhibitors. The renaturation should be performed over a period of 1.5 hours or more. After renaturation the proteins are eluted by the addition of 250 mM imidazole. Imidazole is removed by a final dialyzing step against PBS or 50 mM sodium acetate pH 6 buffer plus 200 mM NaCl. The purified protein is stored at 4 degree C or frozen at −80 degree C.

### Example 12

### Purification Of A Polypeptide From An Inclusion Body

[1171] The following alternative method can be used to purify a polypeptide expressed in E coli when it is present in the form of inclusion bodies. Unless otherwise specified, all of the following steps are conducted at 4-10 degree C.

[1172] Upon completion of the production phase of the E. coli fermentation, the cell culture is cooled to 4-10 degree C and the cells harvested by continuous centrifugation at 15,000 rpm (Heraeus Sepatech). On the basis of the expected yield of protein per unit weight of cell paste and the amount of purified protein required, an appropriate amount of cell paste, by weight, is suspended in a buffer solution containing 100 mM Tris, 50 mM EDTA, pH 7.4. The cells are dispersed to a homogeneous suspension using a high shear mixer.

[1173] The cells are then lysed by passing the solution through a microfluidizer (Microfluidics, Corp. or APV Gaulin, Inc.) twice at 4000-6000 psi. The homogenate is then mixed with NaCl solution to a final concentration of 0.5 M NaCl, followed by centrifugation at 7000 xg for 15 min. The resultant pellet is washed again using 0.5M NaCl, 100 mM Tris, 50 mM EDTA, pH 7.4.

[1174] The resulting washed inclusion bodies are solubilized with 1.5 M guanidine hydrochloride (GuHCl) for 2-4 hours. After 7000 xg centrifugation for 15 min., the pellet is discarded and the polypeptide containing supernatant is incubated at 4 degree C overnight to allow further GuHCl extraction.

[1175] Following high speed centrifugation (30,000 xg) to remove insoluble particles, the GuHCl solubilized protein is refolded by quickly mixing the GuHCl extract with 20 volumes of buffer containing 50 mM sodium, pH 4.5, 150 mM NaCl, 2 mM EDTA by vigorous stirring. The refolded diluted protein solution is kept at 4 degree C without mixing for 12 hours prior to further purification steps.

[1176] To clarify the refolded polypeptide solution, a previously prepared tangential filtration unit equipped with 0.16 um membrane filter with appropriate surface area (e.g., Filtron), equilibrated with 40 mM sodium acetate, pH 6.0 is employed. The filtered sample is loaded onto a cation exchange resin (e.g., Poros HS-50, Perceptive Biosystems). The column is washed with 40 mM sodium acetate, pH 6.0 and eluted with 250 mM, 500 mM, 1000 mM, and 1500 mM NaCl in the same buffer, in a stepwise manner. The absorbance at 280 nm of the effluent is continuously monitored. Fractions are collected and further analyzed by SDS-PAGE.

[1177] Fractions containing the polypeptide are then pooled and mixed with 4 volumes of water. The diluted sample is then loaded onto a previously prepared set of tandem columns of strong anion (Poros HQ-50, Perceptive Biosystems) and weak anion (Poros CM-20, Perceptive Biosystems) exchange resins. The columns are equilibrated with 40 mM sodium acetate, pH 6.0. Both columns are washed with 40 mM sodium acetate, pH 6.0, 200 mM NaCl. The CM-20 column is then eluted using a 10 column volume linear gradient ranging from 0.2 M NaCl, 50 mM sodium acetate, pH 6.0 to 1.0 M NaCl, 50 mM sodium acetate, pH 6.5. Fractions are collected under constant A280 monitoring of the effluent. Fractions containing the polypeptide (determined, for instance, by 16% SDS-PAGE) are then pooled.

[1178] The resultant polypeptide should exhibit greater than 95% purity after the above refolding and purification steps. No major contaminant bands should be observed from Coomassie blue stained 16% SDS-PAGE gel when 5 ug of purified protein is loaded. The purified protein can also be tested for endotoxin/LPS contamination, and typically the LPS content is less than 0.1 ng/ml according to LAL assays.

### Example 13

### Cloning And Expression Of A Polypeptide In A Baculovirus Expression System

[1179] In this example, the plasmid shuttle vector pAc373 is used to insert a polynucleotide into a baculovirus to express a polypeptide. A typical baculovirus expression vector contains the strong polyhedrin promoter of the Autographa californica nuclear polyhedrosis virus (ACMNPV) followed by convenient restriction sites, which may include, for example BamHI, Xba I and Asp718. The polyadenylation site of the simian virus 40 (“SV40”) is often used for efficient polyadenylation. For easy selection of recombinant virus, the plasmid contains the beta-galactosidase gene from E. coli under control of a weak Drosophila promoter in the same orientation, followed by the polyadenylation signal of the polyhedrin gene. The inserted genes are flanked on both sides by viral sequences for cell-mediated homologous recombination with wild-type viral DNA to generate a viable virus that express the cloned polynucleotide.

[1180] Many other baculovirus vectors can be used in place of the vector above, such as pVL941 and pAcIM1, as one skilled in the art would readily appreciate, as long as the construct provides appropriately located signals for transcription, translation, secretion and the like, including a signal peptide and an in-frame AUG as required. Such vectors are described, for instance, in Luckow et al., Virology 170:31-39 (1989).

[1181] A polynucleotide encoding a polypeptide of the present invention is amplified using PCR oligonucleotide primers corresponding to the 5′ and 3′ ends of the DNA sequence, as outlined in the Examples above or otherwise known in the art, to synthesize insertion fragments. The primers used to amplify the cDNA insert should preferably contain restriction sites at the 5′ end of the primers in order to clone the amplified product into the expression vector. Specifically, the cDNA sequence contained in the deposited clone, including the AUG initiation codon and the naturally associated leader sequence identified elsewhere herein (if applicable), is amplified using the PCR protocol described herein. If the naturally occurring signal sequence is used to produce the protein, the vector used does not need a second signal peptide. Alternatively, the vector can be modified to include a baculovirus leader sequence, using the standard methods described in Summers et al., “A Manual of Methods for Baculovirus Vectors and Insect Cell Culture Procedures” Texas Agricultural Experimental Station Bulletin No. 1555 (1987).

[1182] The amplified fragment is isolated from a 1% agarose gel using a commercially available kit (“Geneclean” BIO 101 Inc., La Jolla, Calif.). The fragment then is digested with appropriate restriction enzymes and again purified on a 1% agarose gel.

[1183] The plasmid is digested with the corresponding restriction enzymes and optionally, can be dephosphorylated using calf intestinal phosphatase, using routine procedures known in the art. The DNA is then isolated from a 1% agarose gel using a commercially available kit (“Geneclean” BIO 101 Inc., La Jolla, Calif.).

[1184] The fragment and the dephosphorylated plasmid are ligated together with T4 DNA ligase. E. coli HB101 or other suitable E. coli hosts such as XL-1 Blue (Stratagene Cloning Systems, La Jolla, Calif.) cells are transformed with the ligation mixture and spread on culture plates. Bacteria containing the plasmid are identified by digesting DNA from individual colonies and analyzing the digestion product by gel electrophoresis. The sequence of the cloned fragment is confirmed by DNA sequencing.

[1185] Five ug of a plasmid containing the polynucleotide is co-transformed with 1.0 ug of a commercially available linearized baculovirus DNA (“BaculoGoldtm baculovirus DNA”, Pharmingen, San Diego, Calif.), using the lipofection method described by Felgner et al., Proc. Natl. Acad. Sci. USA 84:7413-7417 (1987). One ug of BaculoGoldtm virus DNA and 5ug of the plasmid are mixed in a sterile well of a microtiter plate containing 50ul of serum-free Grace's medium (Life Technologies Inc., Gaithersburg, Md.). Afterwards, 10 ul Lipofectin plus 90 ul Grace's medium are added, mixed and incubated for 15 minutes at room temperature. Then the transfection mixture is added drop-wise to Sf9 insect cells (ATCC CRL 1711) seeded in a 35 mm tissue culture plate with 1 ml Grace's medium without serum. The plate is then incubated for 5 hours at 27 degrees C. The transfection solution is then removed from the plate and 1 mil of Grace's insect medium supplemented with 10% fetal calf serum is added. Cultivation is then continued at 27 degrees C for four days.

[1186] After four days the supernatant is collected and a plaque assay is performed, as described by Summers and Smith, supra. An agarose gel with “Blue Gal” (Life Technologies Inc., Gaithersburg) is used to allow easy identification and isolation of gal-expressing clones, which produce blue-stained plaques. (A detailed description of a “plaque assay” of this type can also be found in the user's guide for insect cell culture and baculovirology distributed by Life Technologies Inc., Gaithersburg, page 9-10.) After appropriate incubation, blue stained plaques are picked with the tip of a micropipettor (e.g., Eppendorf). The agar containing the recombinant viruses is then resuspended in a microcentrifuge tube containing 200 ul of Grace's medium and the suspension containing the recombinant baculovirus is used to infect Sf9 cells seeded in 35 mm dishes. Four days later the supernatants of these culture dishes are harvested and then they are stored at 4 degree C.

[1187] To verify the expression of the polypeptide, Sf9 cells are grown in Grace's medium supplemented with 10% heat-inactivated FBS. The cells are infected with the recombinant baculovirus containing the polynucleotide at a multiplicity of infection (“MOI”) of about 2. If radiolabeled proteins are desired, 6 hours later the medium is removed and is replaced with SF900 II medium minus methionine and cysteine (available from Life Technologies Inc., Rockville, Md.). After 42 hours, 5 uCi of 35S-methionine and 5 uCi 35S-cysteine (available from Amersham) are added. The cells are further incubated for 16 hours and then are harvested by centrifugation. The proteins in the supernatant as well as the intracellular proteins are analyzed by SDS-PAGE followed by autoradiography (if radiolabeled).

[1188] Microsequencing of the amino acid sequence of the amino terminus of purified protein may be used to determine the amino terminal sequence of the produced protein.

### Example 14

### Expression Of A Polypeptide In Mammalian Cells

[1189] The polypeptide of the present invention can be expressed in a mammalian cell. A typical mammalian expression vector contains a promoter element, which mediates the initiation of transcription of mRNA, a protein coding sequence, and signals required for the termination of transcription and polyadenylation of the transcript. Additional elements include enhancers, Kozak sequences and intervening sequences flanked by donor and acceptor sites for RNA splicing. Highly efficient transcription is achieved with the early and late promoters from SV40, the long terminal repeats (LTRs) from Retroviruses, e.g., RSV, HTLVI, HIVI and the early promoter of the cytomegalovirus (CMV). However, cellular elements can also be used (e.g., the human actin promoter).

[1190] Suitable expression vectors for use in practicing the present invention include, for example, vectors such as pSVL and pMSG (Pharmacia, Uppsala, Sweden), pRSVcat (ATCC 37152), pSV2dhfr (ATCC 37146), pBC12MI (ATCC 67109), pCMVSport 2.0, and pCMVSport 3.0. Mammalian host cells that could be used include, human Hela, 293, H9 and Jurkat cells, mouse NIH3T3 and C127 cells, Cos 1, Cos 7 and CV1, quail QC1-3 cells, mouse L cells and Chinese hamster ovary (CHO) cells.

[1191] Alternatively, the polypeptide can be expressed in stable cell lines containing the polynucleotide integrated into a chromosome. The co-transformation with a selectable marker such as dhfr, gpt, neomycin, hygromycin allows the identification and isolation of the transformed cells.

[1192] The transformed gene can also be amplified to express large amounts of the encoded protein. The DHFR (dihydrofolate reductase) marker is useful in developing cell lines that carry several hundred or even several thousand copies of the gene of interest. (See, e.g., Alt, F. W., et al., J. Biol. Chem... 253:1357-1370 (1978); Hamlin, J. L. and Ma, C., Biochem. et Biophys. Acta, 1097:107-143 (1990); Page, M. J. and Sydenham, M. A., Biotechnology 9:64-68 (1991).) Another useful selection marker is the enzyme glutamine synthase (GS) (Murphy et al., Biochem J. 227:277-279 (1991); Bebbington et al., Bio/Technology 10:169-175 (1992). Using these markers, the mammalian cells are grown in selective medium and the cells with the highest resistance are selected. These cell lines contain the amplified gene(s) integrated into a chromosome. Chinese hamster ovary (CHO) and NSO cells are often used for the production of proteins.

[1193] A polynucleotide of the present invention is amplified according to the protocol outlined in herein. If the naturally occurring signal sequence is used to produce the protein, the vector does not need a second signal peptide. Alternatively, if the naturally occurring signal sequence is not used, the vector can be modified to include a heterologous signal sequence. (See, e.g., WO 96/34891.) The amplified fragment is isolated from a 1% agarose gel using a commercially available kit (“Geneclean” BIO 101 Inc., La Jolla, Calif.). The fragment then is digested with appropriate restriction enzymes and again purified on a 1% agarose gel.

[1194] The amplified fragment is then digested with the same restriction enzyme and purified on a 1% agarose gel. The isolated fragment and the dephosphorylated vector are then ligated with T4 DNA ligase. E. coli HB101 or XL-1 Blue cells are then transformed and bacteria are identified that contain the fragment inserted into plasmid pC6 using, for instance, restriction enzyme analysis.

[1195] Chinese hamster ovary cells lacking an active DHFR gene is used for transformation. Five μg of an expression plasmid is cotransformed with 0.5 ug of the plasmid pSVneo using lipofectin (Felgner et al., supra). The plasmid pSV2-neo contains a dominant selectable marker, the neo gene from Tn5 encoding an enzyme that confers resistance to a group of antibiotics including G418. The cells are seeded in alpha minus MEM supplemented with 1 mg/ml G418. After 2 days, the cells are trypsinized and seeded in hybridoma cloning plates (Greiner, Germany) in alpha minus MEM supplemented with 10, 25, or 50 ng/mi of methotrexate plus 1 mg/ml G418. After about 10-14 days single clones are trypsinized and then seeded in 6-well petri dishes or 10 ml flasks using different concentrations of methotrexate (50 nM, 100 nM, 200 nM, 400 nM, 800 nM). Clones growing at the highest concentrations of methotrexate are then transferred to new 6-well plates containing even higher concentrations of methotrexate (1 uM, 2 uM, 5 uM, 10 mM, 20 mM). The same procedure is repeated until clones are obtained which grow at a concentration of 100 -200 uM. Expression of the desired gene product is analyzed, for instance, by SDS-PAGE and Western blot or by reversed phase HPLC analysis.

### Example 15

### Protein Fusions

[1196] The polypeptides of the present invention are preferably fused to other proteins. These fusion proteins can be used for a variety of applications. For example, fusion of the present polypeptides to His-tag, HA-tag, protein A, IgG domains, and maltose binding protein facilitates purification. (See Example described herein; see also EP A 394,827; Traunecker, et al., Nature 331:84-86 (1988).) Similarly, fusion to IgG-1, IgG-3, and albumin increases the half-life time in vivo. Nuclear localization signals fused to the polypeptides of the present invention can target the protein to a specific subcellular localization, while covalent heterodimer or homodimers can increase or decrease the activity of a fusion protein. Fusion proteins can also create chimeric molecules having more than one function. Finally, fusion proteins can increase solubility and/or stability of the fused protein compared to the non-fused protein. All of the types of fusion proteins described above can be made by modifying the following protocol, which outlines the fusion of a polypeptide to an IgG molecule.

[1197] Briefly, the human Fc portion of the IgG molecule can be PCR amplified, using primers that span the 5′ and 3′ ends of the sequence described below. These primers also should have convenient restriction enzyme sites that will facilitate cloning into an expression vector, preferably a mammalian expression vector. Note that the polynucleotide is cloned without a stop codon, otherwise a fusion protein will not be produced.

[1198] The naturally occurring signal sequence may be used to produce the protein (if applicable). Alternatively, if the naturally occurring signal sequence is not used, the vector can be modified to include a heterologous signal sequence. (See, e.g., WO 96/34891 and/or U.S. Pat. No. 6,066,781, supra.)

(SEQ ID NO:554)

GGGATCCGGAGCCCAAATCTTCTGACAAAACTCACACATGCCCACC
GTGCCCAGCACCTGAATTCGAGGGTGCACCGTCAGTCTTCCTCTTCCCCC
CAAAACCCAAGGACACCCTCATGATCTCCCGGACTCCTGAGGTCACATGC
GTGGTGGTGGACGTAAGCCACGAAGACCCTGAGGTCAAGTTCAACTGGTA
CGTGGACGGCGTGGAGGTGCATAATGCCAAGACAAAGCCGCGGGAGGAGC
AGTACAACAGCACGTACCGTGTGGTCAGCGTCCTCACCGTCCTGCACCAG
GACTGGCTGAATGGCAAGGAGTACAAGTGCAAGGTCTCCAACAAAGCCCT
CCCAACCCCCATCGAGAAAACCATCTCCAAAGCCAAAGGGCAGCCCCGAG
AACCACAGGTGTACACCCTGCCCCCATCCCGGGATGAGCTGACCAAGAAC
CAGGTCAGCCTGACCTGCCTGGTCAAAGGCTTCTATCCAAGCGACATCGC
CGTGGAGTGGGAGAGCAATGGGCAGCCGGAGAACAACTACAAGACCACG
CCTCCCGTGCTGGACTCCGACGGCTCCTTCTTCCTCTACAGCAAGCTCAC
CGTGGACAAGAGCAGGTGGCAGCAGGGGAACGTCTTCTCATGCTCCGTGA
TGCATGAGGCTCTGCACAACCACTACACGCAGAAGAGCCTCTCCCTGTCT
CCGGGTAAATGAGTGCGACGGCCGCGACTCTAGAGGAT

### Example 16

### Production Of An Antibody From A Polypeptide.

[1199] The antibodies of the present invention can be prepared by a variety of methods. (See, Current Protocols, Chapter 2.) As one example of such methods, cells expressing a polypeptide of the present invention are administered to an animal to induce the production of sera containing polyclonal antibodies. In a preferred method, a preparation of the protein is prepared and purified to render it substantially free of natural contaminants. Such a preparation is then introduced into an animal in order to produce polyclonal antisera of greater specific activity.

[1200] In the most preferred method, the antibodies of the present invention are monoclonal antibodies (or protein binding fragments thereof). Such monoclonal antibodies can be prepared using hybridoma technology. (Kohler et al., Nature 256:495 (1975); Kohler et al., Eur. J. Immunol. 6:511 (1976); Kohler et al., Eur. J. Immunol. 6:292 (1976); Hammerling et al., in: Monoclonal Antibodies and T-Cell Hybridomas, Elsevier, N.Y., pp. 563-681 (1981).) In general, such procedures involve immunizing an animal (preferably a mouse) with polypeptide or, more preferably, with a polypeptide-expressing cell. Such cells may be cultured in any suitable tissue culture medium; however, it is preferable to culture cells in Earle's modified Eagle's medium supplemented with 10% fetal bovine serum (inactivated at about 56 degrees C), and supplemented with about 10 g/l of nonessential amino acids, about 1,000 U/ml of penicillin, and about 100 ug/ml of streptomycin.

[1201] The splenocytes of such mice are extracted and fused with a suitable myeloma cell line. Any suitable myeloma cell line may be employed in accordance with the present invention; however, it is preferable to employ the parent myeloma cell line (SP20), available from the ATCC. After fusion, the resulting hybridoma cells are selectively maintained in HAT medium, and then cloned by limiting dilution as described by Wands et al. (Gastroenterology 80:225-232 (1981).) The hybridoma cells obtained through such a selection are then assayed to identify clones which secrete antibodies capable of binding the polypeptide.

[1202] Alternatively, additional antibodies capable of binding to the polypeptide can be produced in a two-step procedure using anti-idiotypic antibodies. Such a method makes use of the fact that antibodies are themselves antigens, and therefore, it is possible to obtain an antibody that binds to a second antibody. In accordance with this method, protein specific antibodies are used to immunize an animal, preferably a mouse. The splenocytes of such an animal are then used to produce hybridoma cells, and the hybridoma cells are screened to identify clones that produce an antibody whose ability to bind to the protein-specific antibody can be blocked by the polypeptide. Such antibodies comprise anti-idiotypic antibodies to the protein-specific antibody and can be used to immunize an animal to induce formation of further protein-specific antibodies.

[1203] It will be appreciated that Fab and F(ab′)2 and other fragments of the antibodies of the present invention may be used according to the methods disclosed herein. Such fragments are typically produced by proteolytic cleavage, using enzymes such as papain (to produce Fab fragments) or pepsin (to produce F(ab′)2 fragments). Alternatively, protein-binding fragments can be produced through the application of recombinant DNA technology or through synthetic chemistry.

[1204] For in vivo use of antibodies in humans, it may be preferable to use “humanized” chimeric monoclonal antibodies. Such antibodies can be produced using genetic constructs derived from hybridoma cells producing the monoclonal antibodies described above. Methods for producing chimeric antibodies are known in the art. (See, for review, Morrison, Science 229:1202 (1985); Oi et al., BioTechniques 4:214 (1986); Cabilly et al., U.S. Pat. No. 4,816,567; Taniguchi et al., EP 171496; Morrison et al., EP 173494; Neuberger et al., WO 8601533; Robinson et al., WO 8702671; Boulianne et al., Nature 312:643 (1984); Neuberger et al., Nature 314:268 (1985).)

[1205] Moreover, in another preferred method, the antibodies directed against the polypeptides of the present invention may be produced in plants. Specific methods are disclosed in U.S. Pat. Nos. 5,959,177, and 6,080,560, which are hereby incorporated in their entirety herein. The methods not only describe methods of expressing antibodies, but also the means of assembling foreign multimeric proteins in plants (i.e., antibodies, etc,), and the subsequent secretion of such antibodies from the plant.

### Example 17

### Method Of Enhancing The Biological Activity/Functional Characteristics Of Invention Through Molecular Evolution

[1206] Although many of the most biologically active proteins known are highly effective for their specified function in an organism, they often possess characteristics that make them undesirable for transgenic, therapeutic, and/or industrial applications. Among these traits, a short physiological half-life is the most prominent problem, and is present either at the level of the protein, or the level of the proteins mRNA. The ability to extend the half-life, for example, would be particularly important for a proteins use in gene therapy, transgenic animal production, the bioprocess production and purification of the protein, and use of the protein as a chemical modulator among others. Therefore, there is a need to identify novel variants of isolated proteins possessing characteristics which enhance their application as a therapeutic for treating diseases of animal origin, in addition to the proteins applicability to common industrial and pharmaceutical applications.

[1207] Thus, one aspect of the present invention relates to the ability to enhance specific characteristics of invention through directed molecular evolution. Such an enhancement may, in a non-limiting example, benefit the inventions utility as an essential component in a kit, the inventions physical attributes such as its solubility, structure, or codon optimization, the inventions specific biological activity, including any associated enzymatic activity, the proteins enzyme kinetics, the proteins Ki, Kcat, Km, Vmax, Kd, protein-protein activity, protein-DNA binding activity, antagonist/inhibitory activity (including direct or indirect interaction), agonist activity (including direct or indirect interaction), the proteins antigenicity (e.g., where it would be desirable to either increase or decrease the antigenic potential of the protein), the immunogenicity of the protein, the ability of the protein to form dimers, trimers, or multimers with either itself or other proteins, the antigenic efficacy of the invention, including its subsequent use a preventative treatment for disease or disease states, or as an effector for targeting diseased genes. Moreover, the ability to enhance specific characteristics of a protein may also be applicable to changing the characterized activity of an enzyme to an activity completely unrelated to its initially characterized activity. Other desirable enhancements of the invention would be specific to each individual protein, and would thus be well known in the art and contemplated by the present invention.

[1208] Directed evolution is comprised of several steps. The first step is to establish a library of variants for the gene or protein of interest. The most important step is to then select for those variants that entail the activity you wish to identify. The design of the screen is essential since your screen should be selective enough to eliminate non-useful variants, but not so stringent as to eliminate all variants. The last step is then to repeat the above steps using the best variant from the previous screen. Each successive cycle, can then be tailored as necessary, such as increasing the stringency of the screen, for example.

[1209] Over the years, there have been a number of methods developed to introduce mutations into macromolecules. Some of these methods include, random mutagenesis, “error-prone” PCR, chemical mutagenesis, site-directed mutagenesis, and other methods well known in the art (for a comprehensive listing of current mutagenesis methods, see Maniatis, Molecular Cloning: A Laboratory Manual, Cold Spring Harbor Press, Cold Spring, N.Y. (1982)). Typically, such methods have been used, for example, as tools for identifying the core functional region(s) of a protein or the function of specific domains of a protein (if a multi-domain protein). However, such methods have more recently been applied to the identification of macromolecule variants with specific or enhanced characteristics.

[1210] Random mutagenesis has been the most widely recognized method to date. Typically, this has been carried out either through the use of “error-prone” PCR (as described in Moore, J., et al, Nature Biotechnology 14:458, (1996), or through the application of randomized synthetic oligonucleotides corresponding to specific regions of interest (as described by Derbyshire, K. M. et al, Gene, 46:145-152, (1986), and Hill, Del., et al, Methods Enzymol., 55:559-568, (1987). Both approaches have limits to the level of mutagenesis that can be obtained. However, either approach enables the investigator to effectively control the rate of mutagenesis. This is particularly important considering the fact that mutations beneficial to the activity of the enzyme are fairly rare. In fact, using too high a level of mutagenesis may counter or inhibit the desired benefit of a useful mutation.

[1211] While both of the aforementioned methods are effective for creating randomized pools of macromolecule variants, a third method, termed “DNA Shuffling”, or “sexual PCR” (WPC, Stemmer, PNAS, 91:10747, (1994)) has recently been elucidated. DNA shuffling has also been referred to as “directed molecular evolution”, “exon-shuffling”, “directed enzyme evolution”, “in vitro evolution”, and “artificial evolution”. Such reference terms are known in the art and are encompassed by the invention. This new, preferred, method apparently overcomes the limitations of the previous methods in that it not only propagates positive traits, but simultaneously eliminates negative traits in the resulting progeny.

[1212] DNA shuffling accomplishes this task by combining the principal of in vitro recombination, along with the method of “error-prone” PCR. In effect, you begin with a randomly digested pool of small fragments of your gene, created by Dnase I digestion, and then introduce said random fragments into an “error-prone” PCR assembly reaction. During the PCR reaction, the randomly sized DNA fragments not only hybridize to their cognate strand, but also may hybridize to other DNA fragments corresponding to different regions of the polynucleotide of interest—regions not typically accessible via hybridization of the entire polynucleotide. Moreover, since the PCR assembly reaction utilizes “error-prone” PCR reaction conditions, random mutations are introduced during the DNA synthesis step of the PCR reaction for all of the fragments—further diversifying the potential hybridization sites during the annealing step of the reaction.

[1213] A variety of reaction conditions could be utilized to carry-out the DNA shuffling reaction. However, specific reaction conditions for DNA shuffling are provided, for example, in PNAS, 91:10747, (1994). Briefly:

[1214] Prepare the DNA substrate to be subjected to the DNA shuffling reaction. Preparation may be in the form of simply purifying the DNA from contaminating cellular material, chemicals, buffers, oligonucleotide primers, deoxynucleotides, RNAs, etc., and may entail the use of DNA purification kits as those provided by Qiagen, Inc., or by the Promega, Corp., for example.

[1215] Once the DNA substrate has been purified, it would be subjected to Dnase I digestion. About 2-4ug of the DNA substrate(s) would be digested with 0.0015 units of Dnase I (Sigma) per ul in 100ul of 50 mM Tris-HCL, pH 7.4/1 mM MgCl2 for 10-20 min. at room temperature. The resulting fragments of 10-50bp could then be purified by running them through a 2% low-melting point agarose gel by electrophoresis onto DE81 ion-exchange paper (Whatmann) or could be purified using Microcon concentrators (Amicon) of the appropriate molecular weight cutoff, or could use oligonucleotide purification columns (Qiagen), in addition to other methods known in the art. If using DE81 ion-exchange paper, the 10-50bp fragments could be eluted from said paper using 1M NaCl, followed by ethanol precipitation.

[1216] The resulting purified fragments would then be subjected to a PCR assembly reaction by re-suspension in a PCR mixture containing: 2mM of each dNTP, 2.2mM MgCl2, 50 mM KCl, -10mM Tris.HCL, pH 9.0, and 0.1% Triton X-100, at a final fragment concentration of 10-30ng/ul. No primers are added at this point. Taq DNA polymerase (Promega) would be used at 2.5 units per 100 ul of reaction mixture. A PCR program of 94 C. for 60s; 94 C. for 30s, 50-55 C. for 30s, and 72 C. for 30s using 30-45 cycles, followed by 72 C. for 5 min using an M J Research (Cambridge, Mass.) PTC-150 thermocycler. After the assembly reaction is completed, a 1:40 dilution of the resulting primerless product would then be introduced into a PCR mixture (using the same buffer mixture used for the assembly reaction) containing 0.8 um of each primer and subjecting this mixture to 15 cycles of PCR (using 94 C. for 30s, 50 C. for 30s, and 72 C. for 30s). The referred primers would be primers corresponding to the nucleic acid sequences of the polynucleotide(s) utilized in the shuffling reaction. Said primers could consist of modified nucleic acid base pairs using methods known in the art and referred to else where herein, or could contain additional sequences (i.e., for adding restriction sites, mutating specific base-pairs, etc.).

[1217] The resulting shuffled, assembled, and amplified product can be purified using methods well known in the art (e.g., Qiagen PCR purification kits) and then subsequently cloned using appropriate restriction enzymes.

[1218] Although a number of variations of DNA shuffling have been published to date, such variations would be obvious to the skilled artisan and are encompassed by the invention. The DNA shuffling method can also be tailored to the desired level of mutagenesis using the methods described by Zhao, et al. (Nucl Acid Res., 25(6):1307-1308, (1997).

[1219] As described above, once the randomized pool has been created, it can then be subjected to a specific screen to identify the variant possessing the desired characteristic(s). Once the variant has been identified, DNA corresponding to the variant could then be used as the DNA substrate for initiating another round of DNA shuffling. This cycle of shuffling, selecting the optimized variant of interest, and then re-shuffling, can be repeated until the ultimate variant is obtained. Examples of model screens applied to identify variants created using DNA shuffling technology may be found in the following publications: J. C., Moore, et al., J. Mol. Biol., 272:336-347, (1997), F. R., Cross, et al., Mol. Cell. Biol., 18:2923-2931, (1998), and A. Crameri., et al., Nat. Biotech., 15:436-438, (1997).

[1220] DNA shuffling has several advantages. First, it makes use of beneficial mutations. When combined with screening, DNA shuffling allows the discovery of the best mutational combinations and does not assume that the best combination contains all the mutations in a population. Secondly, recombination occurs simultaneously with point mutagenesis. An effect of forcing DNA polymerase to synthesize full-length genes from the small fragment DNA pool is a background mutagenesis rate. In combination with a stringent selection method, enzymatic activity has been evolved up to 16000 fold increase over the wild-type form of the enzyme. In essence, the background mutagenesis yielded the genetic variability on which recombination acted to enhance the activity.

[1221] A third feature of recombination is that it can be used to remove deleterious mutations. As discussed above, during the process of the randomization, for every one beneficial mutation, there may be at least one or more neutral or inhibitory mutations. Such mutations can be removed by including in the assembly reaction an excess of the wild-type random-size fragments, in addition to the random-size fragments of the selected mutant from the previous selection. During the next selection, some of the most active variants of the polynucleotide/polypeptide/enzyme, should have lost the inhibitory mutations.

[1222] Finally, recombination enables parallel processing. This represents a significant advantage since there are likely multiple characteristics that would make a protein more desirable (e.g. solubility, activity, etc.). Since it is increasingly difficult to screen for more than one desirable trait at a time, other methods of molecular evolution tend to be inhibitory. However, using recombination, it would be possible to combine the randomized fragments of the best representative variants for the various traits, and then select for multiple properties at once.

[1223] DNA shuffling can also be applied to the polynucleotides and polypeptides of the present invention to decrease their immunogenicity in a specified host. For example, a particular variant of the present invention may be created and isolated using DNA shuffling technology. Such a variant may have all of the desired characteristics, though may be highly immunogenic in a host due to its novel intrinsic structure. Specifically, the desired characteristic may cause the polypeptide to have a non-native structure which could no longer be recognized as a “self” molecule, but rather as a “foreign”, and thus activate a host immune response directed against the novel variant. Such a limitation can be overcome, for example, by including a copy of the gene sequence for a xenobiotic ortholog of the native protein in with the gene sequence of the novel variant gene in one or more cycles of DNA shuffling. The molar ratio of the ortholog and novel variant DNAs could be varied accordingly. Ideally, the resulting hybrid variant identified would contain at least some of the coding sequence which enabled the xenobiotic protein to evade the host immune system, and additionally, the coding sequence of the original novel variant that provided the desired characteristics.

[1224] Likewise, the invention encompasses the application of DNA shuffling technology to the evolution of polynucleotides and polypeptides of the invention, wherein one or more cycles of DNA shuffling include, in addition to the gene template DNA, oligonucleotides coding for known allelic sequences, optimized codon sequences, known variant sequences, known polynucleotide polymorphism sequences, known ortholog sequences, known homologue sequences, additional homologous sequences, additional non-homologous sequences, sequences from another species, and any number and combination of the above.

[1225] In addition to the described methods above, there are a number of related methods that may also be applicable, or desirable in certain cases. Representative among these are the methods discussed in PCT applications WO 98/31700, and WO 98/32845, which are hereby incorporated by reference. Furthermore, related methods can also be applied to the polynucleotide sequences of the present invention in order to evolve invention for creating ideal variants for use in gene therapy, protein engineering, evolution of whole cells containing the variant, or in the evolution of entire enzyme pathways containing polynucleotides of the invention as described in PCT applications WO 98/13485, WO 98/13487, WO 98/27230, WO 98/31837, and Crameri, A., et al., Nat. Biotech., 15:436-438, (1997), respectively.

[1226] Additional methods of applying “DNA Shuffling” technology to the polynucleotides and polypeptides of the present invention, including their proposed applications, may be found in U.S. Pat. No. 5,605,793; PCT Application No. WO 95/22625; PCT Application No. WO 97/20078; PCT Application No. WO 97/35966; and PCT Application No. WO 98/42832; PCT Application No. WO 00/09727 specifically provides methods for applying DNA shuffling to the identification of herbicide selective crops which could be applied to the polynucleotides and polypeptides of the present invention; additionally, PCT Application No. WO 00/12680 provides methods and compositions for generating, modifying, adapting, and optimizing polynucleotide sequences that confer detectable phenotypic properties on plant species; each of the above are hereby incorporated in their entirety herein for all purposes.

### Example 18

### Method Of Determining Alterations In A Gene Corresponding To A Polynucleotide

[1227] RNA isolated from entire families or individual patients presenting with a phenotype of interest (such as a disease) is isolated. cDNA is then generated from these RNA samples using protocols known in the art. (See, Sambrook.) The cDNA is then used as a template for PCR, employing primers surrounding regions of interest, such as those sequences listed in the Sequence Listing and/or the Tables of the present invention. Suggested PCR conditions consist of 35 cycles at 95 degrees C. for 30 seconds; 60-120 seconds at 52-58 degrees C.; and 60-120 seconds at 70 degrees C., using buffer solutions described in Sidransky et al., Science 252:706 (1991).

[1228] PCR products are then sequenced using primers labeled at their 5′ end with T4 polynucleotide kinase, employing SequiTherm Polymerase. (Epicentre Technologies). The intron-exon borders of selected exons is also determined and genomic PCR products analyzed to confirm the results. PCR products harboring suspected mutations is then cloned and sequenced to validate the results of the direct sequencing.

[1229] PCR products is cloned into T-tailed vectors as described in Holton et al., Nucleic Acids Research, 19:1156 (1991) and sequenced with T7 polymerase (United States Biochemical). Affected individuals are identified by mutations not present in unaffected individuals.

[1230] Genomic rearrangements are also observed as a method of determining alterations in a gene corresponding to a polynucleotide. Genomic clones isolated according to the Examples provided herein or otherwise known in the art are nick-translated with digoxigenindeoxy-uridine 5′-triphosphate (Boehringer Manheim), and FISH performed as described in Johnson et al., Methods Cell Biol. 35:73-99 (1991). Hybridization with the labeled probe is carried out using a vast excess of human cot-1 DNA for specific hybridization to the corresponding genomic locus.

[1231] Chromosomes are counterstained with 4,6-diamino-2-phenylidole and propidium iodide, producing a combination of C- and R-bands. Aligned images for precise mapping are obtained using a triple-band filter set (Chroma Technology, Brattleboro, Vt.) in combination with a cooled charge-coupled device camera (Photometrics, Tucson, Aziz.) and variable excitation wavelength filters. (Johnson et al., Genet. Anal. Tech. Appl., 8:75 (1991).) Image collection, analysis and chromosomal fractional length measurements are performed using the ISee Graphical Program System. (Inovision Corporation, Durham, N.C.) Chromosome alterations of the genomic region hybridized by the probe are identified as insertions, deletions, and translocations. These alterations are used as a diagnostic marker for an associated disease.

### Example 19

### Method Of Detecting Abnormal Levels Of A Polypeptide In A Biological Sample

[1232] A polypeptide of the present invention can be detected in a biological sample, and if an increased or decreased level of the polypeptide is detected, this polypeptide is a marker for a particular phenotype. Methods of detection are numerous, and thus, it is understood that one skilled in the art can modify the following assay to fit their particular needs.

[1233] For example, antibody-sandwich ELISAs are used to detect polypeptides in a sample, preferably a biological sample. Wells of a microtiter plate are coated with specific antibodies, at a final concentration of 0.2 to 10 ug/ml. The antibodies are either monoclonal or polyclonal and are produced by the method described elsewhere herein. The wells are blocked so that non-specific binding of the polypeptide to the well is reduced.

[1234] The coated wells are then incubated for >2 hours at RT with a sample containing the polypeptide. Preferably, serial dilutions of the sample should be used to validate results. The plates are then washed three times with deionized or distilled water to remove unbounded polypeptide.

[1235] Next, 50 ul of specific antibody-alkaline phosphatase conjugate, at a concentration of 25-400 ng, is added and incubated for 2 hours at room temperature. The plates are again washed three times with deionized or distilled water to remove unbounded conjugate.

[1236] Add 75 ul of 4-methylumbelliferyl phosphate (MUP) or p-nitrophenyl phosphate (NPP) substrate solution to each well and incubate 1 hour at room temperature. Measure the reaction by a microtiter plate reader. Prepare a standard curve, using serial dilutions of a control sample, and plot polypeptide concentration on the X-axis (log scale) and fluorescence or absorbance of the Y-axis (linear scale). Interpolate the concentration of the polypeptide in the sample using the standard curve.

### Example 20

### Formulation

[1237] The invention also provides methods of treatment and/or prevention diseases, disorders, and/or conditions (such as, for example, any one or more of the diseases or disorders disclosed herein) by administration to a subject of an effective amount of a Therapeutic. By therapeutic is meant a polynucleotides or polypeptides of the invention (including fragments and variants), agonists or antagonists thereof, and/or antibodies thereto, in combination with a pharmaceutically acceptable carrier type (e.g., a sterile carrier).

[1238] The Therapeutic will be formulated and dosed in a fashion consistent with good medical practice, taking into account the clinical condition of the individual patient (especially the side effects of treatment with the Therapeutic alone), the site of delivery, the method of administration, the scheduling of administration, and other factors known to practitioners. The “effective amount” for purposes herein is thus determined by such considerations.

[1239] As a general proposition, the total pharmaceutically effective amount of the Therapeutic administered parenterally per dose will be in the range of about 1 ug/kg/day to 10 mg/kg/day of patient body weight, although, as noted above, this will be subject to therapeutic discretion. More preferably, this dose is at least 0.01 mg/kg/day, and most preferably for humans between about 0.01 and 1 mg/kg/day for the hormone. If given continuously, the Therapeutic is typically administered at a dose rate of about 1 ug/kg/hour to about 50 ug/kg/hour, either by 1-4 injections per day or by continuous subcutaneous infusions, for example, using a mini-pump. An intravenous bag solution may also be employed. The length of treatment needed to observe changes and the interval following treatment for responses to occur appears to vary depending on the desired effect.

[1240] Therapeutics can be administered orally, rectally, parenterally, intracisternally, intravaginally, intraperitoneally, topically (as by powders, ointments, gels, drops or transdermal patch), bucally, or as an oral or nasal spray. “Pharmaceutically acceptable carrier” refers to a non-toxic solid, semisolid or liquid filler, diluent, encapsulating material or formulation auxiliary of any. The term “parenteral” as used herein refers to modes of administration which include intravenous, intramuscular, intraperitoneal, intrasternal, subcutaneous and intraarticular injection and infusion.

[1241] Therapeutics of the invention are also suitably administered by sustained-release systems. Suitable examples of sustained-release Therapeutics are administered orally, rectally, parenterally, intracisternally, intravaginally, intraperitoneally, topically (as by powders, ointments, gels, drops or transdermal patch), bucally, or as an oral or nasal spray. “Pharmaceutically acceptable carrier” refers to a non-toxic solid, semisolid or liquid filler, diluent, encapsulating material or formulation auxiliary of any type. The term “parenteral” as used herein refers to modes of administration which include intravenous, intramuscular, intraperitoneal, intrasternal, subcutaneous and intraarticular injection and infusion.

[1242] Therapeutics of the invention may also be suitably administered by sustained-release systems. Suitable examples of sustained-release Therapeutics include suitable polymeric materials (such as, for example, semi-permeable polymer matrices in the form of shaped articles, e.g., films, or microcapsules), suitable hydrophobic materials (for example as an emulsion in an acceptable oil) or ion exchange resins, and sparingly soluble derivatives (such as, for example, a sparingly soluble salt).

[1243] Sustained-release matrices include polylactides (U.S. Pat. No. 3,773,919, EP 58,481), copolymers of L-glutamic acid and gamma-ethyl-L-glutamate (Sidman et al., Biopolymers 22:547-556 (1983)), poly (2- hydroxyethyl methacrylate) (Langer et al., J. Biomed. Mater. Res. 15:167-277 (1981), and Langer, Chem. Tech. 12:98-105 (1982)), ethylene vinyl acetate (Langer et al., Id.) or poly-D- (−)-3-hydroxybutyric acid (EP 133,988).

[1244] Sustained-release Therapeutics also include liposomally entrapped Therapeutics of the invention (see, generally, Langer, Science 249:1527-1533 (1990); Treat et al., in Liposomes in the Therapy of Infectious Disease and Cancer, Lopez-Berestein and Fidler (eds.), Liss, New York, pp. 317 -327 and 353-365 (1989)). Liposomes containing the Therapeutic are prepared by methods known per se: DE 3,218,121; Epstein et al., Proc. Natl. Acad. Sci. (USA) 82:3688-3692 (1985); Hwang et al., Proc. Natl. Acad. Sci.(USA) 77:4030-4034 (1980); EP 52,322; EP 36,676; EP 88,046; EP 143,949; EP 142,641; Japanese Pat. Appl. 83-118008; U.S. Pat. Nos. 4,485,045 and 4,544,545; and EP 102,324. Ordinarily, the liposomes are of the small (about 200-800 Angstroms) unilamellar type in which the lipid content is greater than about 30 mol. percent cholesterol, the selected proportion being adjusted for the optimal Therapeutic.

[1245] In yet an additional embodiment, the Therapeutics of the invention are delivered by way of a pump (see Langer, supra; Sefton, CRC Crit. Ref. Biomed. Eng. 14:201 (1987); Buchwald et al., Surgery 88:507 (1980); Saudek et al., N. Engl. J. Med. 321:574 (1989)).

[1246] Other controlled release systems are discussed in the review by Langer (Science 249:1527-1533 (1990)).

[1247] For parenteral administration, in one embodiment, the Therapeutic is formulated generally by mixing it at the desired degree of purity, in a unit dosage injectable form (solution, suspension, or emulsion), with a pharmaceutically acceptable carrier, i.e., one that is non-toxic to recipients at the dosages and concentrations employed and is compatible with other ingredients of the formulation. For example, the formulation preferably does not include oxidizing agents and other compounds that are known to be deleterious to the Therapeutic.

[1248] Generally, the formulations are prepared by contacting the Therapeutic uniformly and intimately with liquid carriers or finely divided solid carriers or both. Then, if necessary, the product is shaped into the desired formulation. Preferably the carrier is a parenteral carrier, more preferably a solution that is isotonic with the blood of the recipient. Examples of such carrier vehicles include water, saline, Ringer's solution, and dextrose solution. Non-aqueous vehicles such as fixed oils and ethyl oleate are also useful herein, as well as liposomes.

[1249] The carrier suitably contains minor amounts of additives such as substances that enhance isotonicity and chemical stability. Such materials are non-toxic to recipients at the dosages and concentrations employed, and include buffers such as phosphate, citrate, succinate, acetic acid, and other organic acids or their salts; antioxidants such as ascorbic acid; low molecular weight (less than about ten residues) polypeptides, e.g., polyarginine or tripeptides; proteins, such as serum albumin, gelatin, or immunoglobulins; hydrophilic polymers such as polyvinylpyrrolidone; amino acids, such as glycine, glutamic acid, aspartic acid, or arginine; monosaccharides, disaccharides, and other carbohydrates including cellulose or its derivatives, glucose, mannose, or dextrins; chelating agents such as EDTA; sugar alcohols such as mannitol or sorbitol; counterions such as sodium; and/or nonionic surfactants such as polysorbates, poloxamers, or PEG.

[1250] The Therapeutic will typically be formulated in such vehicles at a concentration of about 0.1 mg/mi to 100 mg/ml, preferably 1-10 mg/ml, at a pH of about 3 to 8. It will be understood that the use of certain of the foregoing excipients, carriers, or stabilizers will result in the formation of polypeptide salts.

[1251] Any pharmaceutical used for therapeutic administration can be sterile. Sterility is readily accomplished by filtration through sterile filtration membranes (e.g., 0.2 micron membranes). Therapeutics generally are placed into a container having a sterile access port, for example, an intravenous solution bag or vial having a stopper pierceable by a hypodermic injection needle.

[1252] Therapeutics ordinarily will be stored in unit or multi-dose containers, for example, sealed ampoules or vials, as an aqueous solution or as a lyophilized formulation for reconstitution. As an example of a lyophilized formulation, 10-ml vials are filled with 5 ml of sterile-filtered 1% (w/v) aqueous Therapeutic solution, and the resulting mixture is lyophilized. The infusion solution is prepared by reconstituting the lyophilized Therapeutic using bacteriostatic Water-for-Injection.

[1253] The invention also provides a pharmaceutical pack or kit comprising one or more containers filled with one or more of the ingredients of the Therapeutics of the invention. Associated with such container(s) can be a notice in the form prescribed by a governmental agency regulating the manufacture, use or sale of pharmaceuticals or biological products, which notice reflects approval by the agency of manufacture, use or sale for human administration. In addition, the Therapeutics may be employed in conjunction with other therapeutic compounds.

[1254] The Therapeutics of the invention may be administered alone or in combination with adjuvants. Adjuvants that may be administered with the Therapeutics of the invention include, but are not limited to, alum, alum plus deoxycholate (ImmunoAg), MTP-PE (Biocine Corp.), QS21 (Genentech, Inc.), BCG, and MPL. In a specific embodiment, Therapeutics of the invention are administered in combination with alum. In another specific embodiment, Therapeutics of the invention are administered in combination with QS-21. Further adjuvants that may be administered with the Therapeutics of the invention include, but are not limited to, Monophosphoryl lipid immunomodulator, AdjuVax 100a, QS-21, QS-18, CRL1005, Aluminum salts, MF-59, and Virosomal adjuvant technology. Vaccines that may be administered with the Therapeutics of the invention include, but are not limited to, vaccines directed toward protection against MMR (measles, mumps, rubella), polio, varicella, tetanus/diptheria, hepatitis A, hepatitis B, haemophilus influenzae B, whooping cough, pneumonia, influenza, Lyme's Disease, rotavirus, cholera, yellow fever, Japanese encephalitis, poliomyelitis, rabies, typhoid fever, and pertussis. Combinations may be administered either concomitantly, e.g., as an admixture, separately but simultaneously or concurrently; or sequentially. This includes presentations in which the combined agents are administered together as a therapeutic mixture, and also procedures in which the combined agents are administered separately but simultaneously, e.g., as through separate intravenous lines into the same individual. Administration “in combination” further includes the separate administration of one of the compounds or agents given first, followed by the second.

[1255] The Therapeutics of the invention may be administered alone or in combination with other therapeutic agents. Therapeutic agents that may be administered in combination with the Therapeutics of the invention, include but not limited to, other members of the TNF family, chemotherapeutic agents, antibiotics, steroidal and non-steroidal anti-inflammatories, conventional immunotherapeutic agents, cytokines and/or growth factors. Combinations may be administered either concomitantly, e.g., as an admixture, separately but simultaneously or concurrently; or sequentially. This includes presentations in which the combined agents are administered together as a therapeutic mixture, and also procedures in which the combined agents are administered separately but simultaneously, e.g., as through separate intravenous lines into the same individual. Administration “in combination” further includes the separate administration of one of the compounds or agents given first, followed by the second.

[1256] In one embodiment, the Therapeutics of the invention are administered in combination with members of the TNF family. TNF, TNF-related or TNF-like molecules that may be administered with the Therapeutics of the invention include, but are not limited to, soluble forms of TNF-alpha, lymphotoxin-alpha (LT-alpha, also known as TNF-beta), LT-beta (found in complex heterotrimer LT-alpha2-beta), OPGL, FasL, CD27L, CD30L, CD40L, 4-1BBL, DcR3, OX40L, TNF-gamma (International Publication No. WO 96/14328), AIM-I (International Publication No. WO 97/33899), endokine-alpha (International Publication No. WO 98/07880), TR6 (International Publication No. WO 98/30694), OPG, and neutrokine-alpha (International Publication No. WO 98/18921, OX40, and nerve growth factor (NGF), and soluble forms of Fas, CD30, CD27, CD40 and 4-IBB, TR2 (International Publication No. WO 96/34095), DR3 (International Publication No. WO 97/33904), DR4 (International Publication No. WO 98/32856), TR5 (International Publication No. WO 98/30693), TR6 (International Publication No. WO 98/30694), TR7 (International Publication No. WO 98/41629), TRANK, TR9 (International Publication No. WO 98/56892),TR10 (International Publication No. WO 98/54202), 312C2 (International Publication No. WO 98/06842), and TR12, and soluble forms CD154, CD70, and CD153.

[1257] In certain embodiments, Therapeutics of the invention are administered in combination with antiretroviral agents, nucleoside reverse transcriptase inhibitors, non-nucleoside reverse transcriptase inhibitors, and/or protease inhibitors. Nucleoside reverse transcriptase inhibitors that may be administered in combination with the Therapeutics of the invention, include, but are not limited to, RETROVIR( (zidovudine/AZT), VIDEX( (didanosine/ddl), HIVID( (zalcitabine/ddC), ZERIT((stavudine/d4T), EPIVIR( (lamivudine/3TC), and COMBIVIR((zidovudine/lamivudine). Non-nucleoside reverse transcriptase inhibitors that may be administered in combination with the Therapeutics of the invention, include, but are not limited to, VIRAMUNE( (nevirapine), RESCRIPTOR( (delavirdine), and SUSTIVA( (efavirenz). Protease inhibitors that may be administered in combination with the Therapeutics of the invention, include, but are not limited to, CRXIVAN((indinavir), NORVIR( (ritonavir), INVIRASE( (saquinavir), and VIRACEPT((nelfinavir). In a specific embodiment, antiretroviral agents, nucleoside reverse transcriptase inhibitors, non-nucleoside reverse transcriptase inhibitors, and/or protease inhibitors may be used in any combination with Therapeutics of the invention to treat AIDS and/or to prevent or treat HIV infection.

[1258] In other embodiments, Therapeutics of the invention may be administered in combination with anti-opportunistic infection agents. Anti-opportunistic agents that may be administered in combination with the Therapeutics of the invention, include, but are not limited to, TRIMETHOPRIM-SULFAMETHOXAZOLE(, DAPSONE(,PENTAMIDINE(, ATOVAQUONE(, ISONIAZID (, RIFAMPIN(,PYRAZINAMIDE(, ETHAMBUTOL(, RIFABUTIN(, CLARITHROMYCIN(,AZITHROMYCIN(, GANCICLOVIR(, FOSCARNET(, CIDOFOVIR(,FLUCONAZOLE(, ITRACONAZOLE(, KETOCONAZOLE(, ACYCLOVIR (, FAMCICOLVIR(, PYRIMETHAMINE(, LEUCOVORIN(, NEUPOGEN((filgrastim/G-CSF), and LEUKINE( (sargramostim/GM-CSF). In a specific embodiment, Therapeutics of the invention are used in any combination with TRIMETHOPRIM-SULFAMETHOXAZOLE(, DAPSONE(, PENTAMIDINE(,and/or ATOVAQUONE( to prophylactically treat or prevent an opportunistic Pneumocystis carinii pneumonia infection. In another specific embodiment, Therapeutics of the invention are used in any combination with ISONIAZID(,RIFAMPIN(, PYRAZINAMIDE(, and/or ETHAMBUTOL( to prophylactically treat or prevent an opportunistic Mycobacterium avium complex infection. In another specific embodiment, Therapeutics of the invention are used in any combination with RIFABUTIN(, CLARITHROMYCIN(, and/or AZITHROMYCIN( to prophylactically treat or prevent an opportunistic Mycobacterium tuberculosis infection. In another specific embodiment, Therapeutics of the invention are used in any combination with GANCICLOVIR(, FOSCARNET(, and/or CIDOFOVIR( to prophylactically treat or prevent an opportunistic cytomegalovirus infection. In another specific embodiment, Therapeutics of the invention are used in any combination with FLUCONAZOLE(, ITRACONAZOLE(, and/or KETOCONAZOLE( to prophylactically treat or prevent an opportunistic fungal infection. In another specific embodiment, Therapeutics of the invention are used in any combination with ACYCLOVIR( and/or FAMCICOLVIR( to prophylactically treat or prevent an opportunistic herpes simplex virus type I and/or type II infection. In another specific embodiment, Therapeutics of the invention are used in any combination with PYRIMETHAMINE( and/or LEUCOVORIN( to prophylactically treat or prevent an opportunistic Toxoplasma gondii infection. In another specific embodiment, Therapeutics of the invention are used in any combination with LEUCOVORIN( and/or NEUPOGEN( to prophylactically treat or prevent an opportunistic bacterial infection.

[1259] In a further embodiment, the Therapeutics of the invention are administered in combination with an antiviral agent. Antiviral agents that may be administered with the Therapeutics of the invention include, but are not limited to, acyclovir, ribavirin, amantadine, and remantidine.

[1260] In a further embodiment, the Therapeutics of the invention are administered in combination with an antibiotic agent. Antibiotic agents that may be administered with the Therapeutics of the invention include, but are not limited to, amoxicillin, beta-lactamases, aminoglycosides, beta-lactam (glycopeptide), beta-lactamases, Clindamycin, chloramphenicol, cephalosporins, ciprofloxacin, ciprofloxacin, erythromycin, fluoroquinolones, macrolides, metronidazole, penicillins, quinolones, rifampin, streptomycin, sulfonamide, tetracyclines, trimethoprim, trimethoprim-sulfamthoxazole, and vancomycin.

[1261] Conventional nonspecific immunosuppressive agents, that may be administered in combination with the Therapeutics of the invention include, but are not limited to, steroids, cyclosporine, cyclosporine analogs, cyclophosphamide methylprednisone, prednisone, azathioprine, FK-506, 15-deoxyspergualin, and other immunosuppressive agents that act by suppressing the function of responding T cells.

[1262] In specific embodiments, Therapeutics of the invention are administered in combination with immunosuppressants. immunosuppressants preparations that may be administered with the Therapeutics of the invention include, but are not limited to, ORTHOCLONE( (OKT3), SANDIMMUNE(/NEORAL(/SANGDYA( (cyclosporin), PROGRAF( (tacrolimus), CELLCEPT( (mycophenolate), Azathioprine, glucorticosteroids, and RAPAMUNE( (sirolimus). In a specific embodiment, immunosuppressants may be used to prevent rejection of organ or bone marrow transplantation.

[1263] In an additional embodiment, Therapeutics of the invention are administered alone or in combination with one or more intravenous immune globulin preparations. Intravenous immune globulin preparations that may be administered with the Therapeutics of the invention include, but not limited to, GAMMAR(, IVEEGAM(, SANDOGLOBULIN(, GAMMAGARD S/D(, and GAMIMUNE(. In a specific embodiment, Therapeutics of the invention are administered in combination with intravenous immune globulin preparations in transplantation therapy (e.g., bone marrow transplant).

[1264] In an additional embodiment, the Therapeutics of the invention are administered alone or in combination with an anti-inflammatory agent. Anti-inflammatory agents that may be administered with the Therapeutics of the invention include, but are not limited to, glucocorticoids and the nonsteroidal anti-inflammatories, aminoarylcarboxylic acid derivatives, arylacetic acid derivatives, arylbutyric acid derivatives, arylcarboxylic acids, arylpropionic acid derivatives, pyrazoles, pyrazolones, salicylic acid derivatives, thiazinecarboxamides, e-acetamidocaproic acid, S-adenosylmethionine, 3-amino-4-hydroxybutyric acid, amixetrine, bendazac, benzydamine, bucolome, difenpiramide, ditazol, emorfazone, guaiazulene, nabumetone, nimesulide, orgotein, oxaceprol, paranyline, perisoxal, pifoxime, proquazone, proxazole, and tenidap.

[1265] In another embodiment, compositions of the invention are administered in combination with a chemotherapeutic agent. Chemotherapeutic agents that may be administered with the Therapeutics of the invention include, but are not limited to, antibiotic derivatives (e.g., doxorubicin, bleomycin, daunorubicin, and dactinomycin); antiestrogens (e.g., tamoxifen); antimetabolites (e.g., fluorouracil, 5-FU, methotrexate, floxuridine, interferon alpha-2b, glutamic acid, plicamycin, mercaptopurine, and 6-thioguanine); cytotoxic agents (e.g., carmustine, BCNU, lomustine, CCNU, cytosine arabinoside, cyclophosphamide, estramustine, hydroxyurea, procarbazine, mitomycin, busulfan, cis-platin, and vincristine sulfate); hormones (e.g., medroxyprogesterone, estramustine phosphate sodium, ethinyl estradiol, estradiol, megestrol acetate, methyltestosterone, diethylstilbestrol diphosphate, chlorotrianisene, and testolactone); nitrogen mustard derivatives (e.g., mephalen, chorambucil, mechlorethamine (nitrogen mustard) and thiotepa); steroids and combinations (e.g., bethamethasone sodium phosphate); and others (e.g., dicarbazine, asparaginase, mitotane, vincristine sulfate, vinblastine sulfate, and etoposide).

[1266] In a specific embodiment, Therapeutics of the invention are administered in combination with CHOP (cyclophosphamide, doxorubicin, vincristine, and prednisone) or any combination of the components of CHOP. In another embodiment, Therapeutics of the invention are administered in combination with Rituximab. In a further embodiment, Therapeutics of the invention are administered with Rituxmab and CHOP, or Rituxmab and any combination of the components of CHOP.

[1267] In an additional embodiment, the Therapeutics of the invention are administered in combination with cytokines. Cytokines that may be administered with the Therapeutics of the invention include, but are not limited to, IL2, IL3, ILA, IL5, IL6, IL7, IL10, IL12, IL13, IL15, anti-CD40, CD40L, IFN-gamma and TNF-alpha. In another embodiment, Therapeutics of the invention may be administered with any interleukin, including, but not limited to, IL-lalpha, IL-lbeta, IL-2, IL-3, IL-4, IL-5, IL-6, IL-7, IL-8, IL-9, IL-10, IL-11, IL-12, IL-13, IL-14, IL-15, IL-16, IL-17, IL-18, IL-19, IL-20, and IL-21.

[1268] In an additional embodiment, the Therapeutics of the invention are administered in combination with angiogenic proteins. Angiogenic proteins that may be administered with the Therapeutics of the invention include, but are not limited to, Glioma Derived Growth Factor (GDGF), as disclosed in European Patent Number EP-399816; Platelet Derived Growth Factor-A (PDGF-A), as disclosed in European Patent Number EP-682110; Platelet Derived Growth Factor-B (PDGF-B), as disclosed in European Patent Number EP-282317; Placental Growth Factor (PIGF), as disclosed in International Publication Number WO 92/06194; Placental Growth Factor-2 (PlGF-2), as disclosed in Hauser et al., Gorwth Factors, 4:259-268 (1993); Vascular Endothelial Growth Factor (VEGF), as disclosed in International Publication Number WO 90/13649; Vascular Endothelial Growth Factor-A (VEGF-A), as disclosed in European Patent Number EP-506477; Vascular Endothelial Growth Factor-2 (VEGF-2), as disclosed in International Publication Number WO 96/39515; Vascular Endothelial Growth Factor B (VEGF-3); Vascular Endothelial Growth Factor B-186 (VEGF-B186), as disclosed in International Publication Number WO 96/26736; Vascular Endothelial Growth Factor-D (VEGF-D), as disclosed in International Publication Number WO 98/02543; Vascular Endothelial Growth Factor-D (VEGF-D), as disclosed in International Publication Number WO 98/07832; and Vascular Endothelial Growth Factor-E (VEGF-E), as disclosed in German Patent Number DE19639601. The above mentioned references are incorporated herein by reference herein.

[1269] In an additional embodiment, the Therapeutics of the invention are administered in combination with hematopoietic growth factors. Hematopoietic growth factors that may be administered with the Therapeutics of the invention include, but are not limited to, LEUKINE( (SARGRAMOSTIM( ) and NEUPOGEN((FILGRASTIM( ).

[1270] In an additional embodiment, the Therapeutics of the invention are administered in combination with Fibroblast Growth Factors. Fibroblast Growth Factors that may be administered with the Therapeutics of the invention include, but are not limited to, FGF-1, FGF-2, FGF-3, FGF-4, FGF-5, FGF-6, FGF-7, FGF-8, FGF-9, FGF-10, FGF-l 1, FGF-12, FGF-13, FGF-14, and FGF-15.

[1271] In additional embodiments, the Therapeutics of the invention are administered in combination with other therapeutic or prophylactic regimens, such as, for example, radiation therapy.

### Example 21

### Method Of Treating Decreased Levels Of The Polypeptide

[1272] The present invention relates to a method for treating an individual in need of an increased level of a polypeptide of the invention in the body comprising administering to such an individual a composition comprising a therapeutically effective amount of an agonist of the invention (including polypeptides of the invention). Moreover, it will be appreciated that conditions caused by a decrease in the standard or normal expression level of a secreted protein in an individual can be treated by administering the polypeptide of the present invention, preferably in the secreted form. Thus, the invention also provides a method of treatment of an individual in need of an increased level of the polypeptide comprising administering to such an individual a Therapeutic comprising an amount of the polypeptide to increase the activity level of the polypeptide in such an individual.

[1273] For example, a patient with decreased levels of a polypeptide receives a daily dose 0.1-100 ug/kg of the polypeptide for six consecutive days. Preferably, the polypeptide is in the secreted form. The exact details of the dosing scheme, based on administration and formulation, are provided herein.

### Example 22

### Method Of Treating Increased Levels Of The Polypeptide

[1274] The present invention also relates to a method of treating an individual in need of a decreased level of a polypeptide of the invention in the body comprising administering to such an individual a composition comprising a therapeutically effective amount of an antagonist of the invention (including polypeptides and antibodies of the invention).

[1275] In one example, antisense technology is used to inhibit production of a polypeptide of the present invention. This technology is one example of a method of decreasing levels of a polypeptide, preferably a secreted form, due to a variety of etiologies, such as cancer. For example, a patient diagnosed with abnormally increased levels of a polypeptide is administered intravenously antisense polynucleotides at 0.5, 1.0, 1.5, 2.0 and 3.0 mg/kg day for 21 days. This treatment is repeated after a 7-day rest period if the treatment was well tolerated. The formulation of the antisense polynucleotide is provided herein.

### Example 23

### Method Of Treatment Using Gene Therapy-Ex Vivo

[1276] One method of gene therapy transplants fibroblasts, which are capable of expressing a polypeptide, onto a patient. Generally, fibroblasts are obtained from a subject by skin biopsy. The resulting tissue is placed in tissue-culture medium and separated into small pieces. Small chunks of the tissue are placed on a wet surface of a tissue culture flask, approximately ten pieces are placed in each flask. The flask is turned upside down, closed tight and left at room temperature over night. After 24 hours at room temperature, the flask is inverted and the chunks of tissue remain fixed to the bottom of the flask and fresh media (e.g., Ham's F12 media, with 10% FBS, penicillin and streptomycin) is added. The flasks are then incubated at 37 degree C. for approximately one week.

[1277] At this time, fresh media is added and subsequently changed every several days. After an additional two weeks in culture, a monolayer of fibroblasts emerge. The monolayer is trypsinized and scaled into larger flasks.

[1278] pMV-7 (Kirschmeier, P. T. et al., DNA, 7:219-25 (1988)), flanked by the long terminal repeats of the Moloney murine sarcoma virus, is digested with EcoRI and HindIII and subsequently treated with calf intestinal phosphatase. The linear vector is fractionated on agarose gel and purified, using glass beads.

[1279] The cDNA encoding a polypeptide of the present invention can be amplified using PCR primers which correspond to the 5′ and 3′ end sequences respectively as set forth in the Examples herein or otherwise known in the art, using primers and having appropriate restriction sites and initiation/stop codons, if necessary. Preferably, the 5′ primer contains an EcoRI site and the 3′ primer includes a HinduII site. Equal quantities of the Moloney murine sarcoma virus linear backbone and the amplified EcoRI and HindIII fragment are added together, in the presence of T4 DNA ligase. The resulting mixture is maintained under conditions appropriate for ligation of the two fragments. The ligation mixture is then used to transform bacteria HB101, which are then plated onto agar containing kanamycin for the purpose of confirming that the vector has the gene of interest properly inserted.

[1280] The amphotropic pA317 or GP+am12 packaging cells are grown in tissue culture to confluent density in Dulbecco's Modified Eagles Medium (DMEM) with 10% calf serum (CS), penicillin and streptomycin. The MSV vector containing the gene is then added to the media and the packaging cells transduced with the vector. The packaging cells now produce infectious viral particles containing the gene (the packaging cells are now referred to as producer cells).

[1281] Fresh media is added to the transduced producer cells, and subsequently, the media is harvested from a 10 cm plate of confluent producer cells. The spent media, containing the infectious viral particles, is filtered through a millipore filter to remove detached producer cells and this media is then used to infect fibroblast cells. Media is removed from a sub-confluent plate of fibroblasts and quickly replaced with the media from the producer cells. This media is removed and replaced with fresh media. If the titer of virus is high, then virtually all fibroblasts will be infected and no selection is required. If the titer is very low, then it is necessary to use a retroviral vector that has a selectable marker, such as neo or his. Once the fibroblasts have been efficiently infected, the fibroblasts are analyzed to determine whether protein is produced.

[1282] The engineered fibroblasts are then transplanted onto the host, either alone or after having been grown to confluence on cytodex 3 microcarrier beads.

### Example 24

### Gene Therapy Using Endogenous Genes Corresponding To Polynucleotides Of The Invention

[1283] Another method of gene therapy according to the present invention involves operably associating the endogenous polynucleotide sequence of the invention with a promoter via homologous recombination as described, for example, in U.S. Pat. NO: 5,641,670, issued Jun. 24, 1997; International Publication NO: WO 96/29411, published Sep. 26, 1996; International Publication NO: WO 94/12650, published August 4, 1994; Koller et al., Proc. Natl. Acad. Sci. USA, 86:8932-8935 (1989); and Zijlstra et al., Nature, 342:435-438 (1989). This method involves the activation of a gene which is present in the target cells, but which is not expressed in the cells, or is expressed at a lower level than desired.

[1284] Polynucleotide constructs are made which contain a promoter and targeting sequences, which are homologous to the 5′ non-coding sequence of endogenous polynucleotide sequence, flanking the promoter. The targeting sequence will be sufficiently near the 5′ end of the polynucleotide sequence so the promoter will be operably linked to the endogenous sequence upon homologous recombination. The promoter and the targeting sequences can be amplified using PCR. Preferably, the amplified promoter contains distinct restriction enzyme sites on the 5′ and 3′ ends. Preferably, the 3′ end of the first targeting sequence contains the same restriction enzyme site as the 5′ end of the amplified promoter and the 5′ end of the second targeting sequence contains the same restriction site as the 3′ end of the amplified promoter.

[1285] The amplified promoter and the amplified targeting sequences are digested with the appropriate restriction enzymes and subsequently treated with calf intestinal phosphatase. The digested promoter and digested targeting sequences are added together in the presence of T4 DNA ligase. The resulting mixture is maintained under conditions appropriate for ligation of the two fragments. The construct is size fractionated on an agarose gel then purified by phenol extraction and ethanol precipitation.

[1286] In this Example, the polynucleotide constructs are administered as naked polynucleotides via electroporation. However, the polynucleotide constructs may also be administered with transfection-facilitating agents, such as liposomes, viral sequences, viral particles, precipitating agents, etc. Such methods of delivery are known in the art.

[1287] Once the cells are transfected, homologous recombination will take place which results in the promoter being operably linked to the endogenous polynucleotide sequence. This results in the expression of polynucleotide corresponding to the polynucleotide in the cell. Expression may be detected by immunological staining, or any other method known in the art.

[1288] Fibroblasts are obtained from a subject by skin biopsy. The resulting tissue is placed in DMEM+10% fetal calf serum. Exponentially growing or early stationary phase fibroblasts are trypsinized and rinsed from the plastic surface with nutrient medium. An aliquot of the cell suspension is removed for counting, and the remaining cells are subjected to centrifugation. The supernatant is aspirated and the pellet is resuspended in 5 ml of electroporation buffer (20 mM HEPES pH 7.3, 137 mM NaCl, 5 mM KCl, 0.7 mM Na2 HPO4, 6 mM dextrose). The cells are recentrifuged, the supernatant aspirated, and the cells resuspended in electroporation buffer containing 1 mg/ml acetylated bovine serum albumin. The final cell suspension contains approximately 3×106 cells/mi. Electroporation should be performed immediately following resuspension.

[1289] Plasmid DNA is prepared according to standard techniques. For example, to construct a plasmid for targeting to the locus corresponding to the polynucleotide of the invention, plasmid pUC18 (MBI Fermentas, Amherst, N.Y.) is digested with HindIII. The CMV promoter is amplified by PCR with an XbaI site on the 5′ end and a BamHI site on the 3′end. Two non-coding sequences are amplified via PCR: one non-coding sequence (fragment 1) is amplified with a HindIII site at the 5′ end and an Xba site at the 3′end; the other non-coding sequence (fragment 2) is amplified with a BamHI site at the 5′end and a HindIII site at the 3′end. The CMV promoter and the fragments (1 and 2) are digested with the appropriate enzymes (CMV promoter - XbaI and BamHI; fragment 1- XbaI; fragment 2 - BamHI) and ligated together. The resulting ligation product is digested with HindIII, and ligated with the HindIII-digested pUC 18 plasmid.

[1290] Plasmid DNA is added to a sterile cuvette with a 0.4 cm electrode gap (Bio-Rad). The final DNA concentration is generally at least 120 μg/ml. 0.5 ml of the cell suspension (containing approximately 1.5.×106 cells) is then added to the cuvette, and the cell suspension and DNA solutions are gently mixed. Electroporation is performed with a Gene-Pulser apparatus (Bio-Rad). Capacitance and voltage are set at 960 μF and 250-300 V, respectively. As voltage increases, cell survival decreases, but the percentage of surviving cells that stably incorporate the introduced DNA into their genome increases dramatically. Given these parameters, a pulse time of approximately 14-20 mSec should be observed.

[1291] Electroporated cells are maintained at room temperature for approximately 5 min, and the contents of the cuvette are then gently removed with a sterile transfer pipette. The cells are added directly to 10 ml of prewarmed nutrient media (DMEM with 15% calf serum) in a 10 cm dish and incubated at 37 degree C. The following day, the media is aspirated and replaced with 10 ml of fresh media and incubated for a further 16-24 hours.

[1292] The engineered fibroblasts are then injected into the host, either alone or after having been grown to confluence on cytodex 3 microcarrier beads. The fibroblasts now produce the protein product. The fibroblasts can then be introduced into a patient as described above.

### Example 25

### Method Of Treatment Using Gene Therapy - In Vivo

[1293] Another aspect of the present invention is using in vivo gene therapy methods to treat disorders, diseases and conditions. The gene therapy method relates to the introduction of naked nucleic acid (DNA, RNA, and antisense DNA or RNA) sequences into an animal to increase or decrease the expression of the polypeptide. The polynucleotide of the present invention may be operatively linked to a promoter or any other genetic elements necessary for the expression of the polypeptide by the target tissue. Such gene therapy and delivery techniques and methods are known in the art, see, for example, WO90/11092, WO98/11779; U.S. Pat. No. 5,693,622, 5,705,151, 5,580,859; Tabata et al., Cardiovasc. Res. 35(3):470-479 (1997); Chao et al., Pharmacol. Res. 35(6):517-522 (1997); Wolff, Neuromuscul. Disord. 7(5):314-318 (1997); Schwartz et al., Gene Ther. 3(5):405-411 (1996); Tsurumi et al., Circulation 94(12):3281-3290 (1996) (incorporated herein by reference).

[1294] The polynucleotide constructs may be delivered by any method that delivers injectable materials to the cells of an animal, such as, injection into the interstitial space of tissues (heart, muscle, skin, lung, liver, intestine and the like). The polynucleotide constructs can be delivered in a pharmaceutically acceptable liquid or aqueous carrier.

[1295] The term “naked” polynucleotide, DNA or RNA, refers to sequences that are free from any delivery vehicle that acts to assist, promote, or facilitate entry into the cell, including viral sequences, viral particles, liposome formulations, lipofectin or precipitating agents and the like. However, the polynucleotides of the present invention may also be delivered in liposome formulations (such as those taught in Felgner P. L. et al. (1995) Ann. NY Acad. Sci. 772:126-139 and Abdallah B. et al. (1995) Biol. Cell 85(1): 1-7) which can be prepared by methods well known to those skilled in the art.

[1296] The polynucleotide vector constructs used in the gene therapy method are preferably constructs that will not integrate into the host genome nor will they contain sequences that allow for replication. Any strong promoter known to those skilled in the art can be used for driving the expression of DNA. Unlike other gene therapies techniques, one major advantage of introducing naked nucleic acid sequences into target cells is the transitory nature of the polynucleotide synthesis in the cells. Studies have shown that non-replicating DNA sequences can be introduced into cells to provide production of the desired polypeptide for periods of up to six months.

[1297] The polynucleotide construct can be delivered to the interstitial space of tissues within the an animal, including of muscle, skin, brain, lung, liver, spleen, bone marrow, thymus, heart, lymph, blood, bone, cartilage, pancreas, kidney, gall bladder, stomach, intestine, testis, ovary, uterus, rectum, nervous system, eye, gland, and connective tissue. Interstitial space of the tissues comprises the intercellular fluid, mucopolysaccharide matrix among the reticular fibers of organ tissues, elastic fibers in the walls of vessels or chambers, collagen fibers of fibrous tissues, or that same matrix within connective tissue ensheathing muscle cells or in the lacunae of bone. It is similarly the space occupied by the plasma of the circulation and the lymph fluid of the lymphatic channels. Delivery to the interstitial space of muscle tissue is preferred for the reasons discussed below. They may be conveniently delivered by injection into the tissues comprising these cells. They are preferably delivered to and expressed in persistent, non-dividing cells which are differentiated, although delivery and expression may be achieved in non-differentiated or less completely differentiated cells, such as, for example, stem cells of blood or skin fibroblasts. In vivo muscle cells are particularly competent in their ability to take up and express polynucleotides.

[1298] For the naked polynucleotide injection, an effective dosage amount of DNA or RNA will be in the range of from about 0.05 g/kg body weight to about 50 mg/kg body weight. Preferably the dosage will be from about 0.005 mg/kg to about 20 mg/kg and more preferably from about 0.05 mg/kg to about 5 mg/kg. Of course, as the artisan of ordinary skill will appreciate, this dosage will vary according to the tissue site of injection. The appropriate and effective dosage of nucleic acid sequence can readily be determined by those of ordinary skill in the art and may depend on the condition being treated and the route of administration. The preferred route of administration is by the parenteral route of injection into the interstitial space of tissues. However, other parenteral routes may also be used, such as, inhalation of an aerosol formulation particularly for delivery to lungs or bronchial tissues, throat or mucous membranes of the nose. In addition, naked polynucleotide constructs can be delivered to arteries during angioplasty by the catheter used in the procedure.

[1299] The dose response effects of injected polynucleotide in muscle in vivo is determined as follows. Suitable template DNA for production of mRNA coding for polypeptide of the present invention is prepared in accordance with a standard recombinant DNA methodology. The template DNA, which may be either circular or linear, is either used as naked DNA or complexed with liposomes. The quadriceps muscles of mice are then injected with various amounts of the template DNA, Five to six week old female and male Balb/C mice are anesthetized by intraperitoneal injection with 0.3 ml of 2.5% Avertin. A 1.5 cm incision is made on the anterior thigh, and the quadriceps muscle is directly visualized. The template DNA is injected in 0.1 ml of carrier in a 1 cc syringe through a 27 gauge needle over one minute, approximately 0.5 cm from the distal insertion site of the muscle into the knee and about 0.2 cm deep. A suture is placed over the injection site for future localization, and the skin is closed with stainless steel clips.

[1300] After an appropriate incubation time (e.g., 7 days) muscle extracts are prepared by excising the entire quadriceps. Every fifth 15 um cross-section of the individual quadriceps muscles is histochemically stained for protein expression. A time course for protein expression may be done in a similar fashion except that quadriceps from different mice are harvested at different times. Persistence of DNA in muscle following injection may be determined by Southern blot analysis after preparing total cellular DNA and HIRT supernatants from injected and control mice. The results of the above experimentation in mice can be use to extrapolate proper dosages and other treatment parameters in humans and other animals using naked DNA.

### Example 26

### Transgenic Animals

[1301] The polypeptides of the invention can also be expressed in transgenic animals. Animals of any species, including, but not limited to, mice, rats, rabbits, hamsters, guinea pigs, pigs, micro-pigs, goats, sheep, cows and non-human primates, e.g., baboons, monkeys, and chimpanzees may be used to generate transgenic animals. In a specific embodiment, techniques described herein or otherwise known in the art, are used to express polypeptides of the invention in humans, as part of a gene therapy protocol.

[1302] Any technique known in the art may be used to introduce the transgene (i.e., polynucleotides of the invention) into animals to produce the founder lines of transgenic animals. Such techniques include, but are not limited to, pronuclear microinjection (Paterson et al., Appl. Microbiol. Biotechnol. 40:691-698 (1994); Carver et al., Biotechnology (NY) 11: 1263-1270 (1993); Wright et al., Biotechnology (NY) 9:830-834 (1991); and Hoppe et al., U.S. Pat. No. 4,873,191 (1989)); retrovirus mediated gene transfer into germ lines (Van der Putten et al., Proc. Natl. Acad. Sci., USA 82:6148-6152 (1985)), blastocysts or embryos; gene targeting in embryonic stem cells (Thompson et al., Cell 56:313-321 (1989)); electroporation of cells or embryos (Lo, 1983, Mol Cell. Biol. 3:1803-1814 (1983)); introduction of the polynucleotides of the invention using a gene gun (see, e.g., Ulmer et al., Science 259:1745 (1993); introducing nucleic acid constructs into embryonic pleuripotent stem cells and transferring the stem cells back into the blastocyst; and sperm-mediated gene transfer (Lavitrano et al., Cell 57:717-723 (1989); etc. For a review of such techniques, see Gordon, “Transgenic Animals” Intl. Rev. Cytol. 115:171-229 (1989), which is incorporated by reference herein in its entirety.

[1303] Any technique known in the art may be used to produce transgenic clones containing polynucleotides of the invention, for example, nuclear transfer into enucleated oocytes of nuclei from cultured embryonic, fetal, or adult cells induced to quiescence (Campell et al., Nature 380:64-66 (1996); Wilmut et al., Nature 385:810-813 (1997)).

[1304] The present invention provides for transgenic animals that carry the transgene in all their cells, as well as animals which carry the transgene in some, but not all their cells, i.e., mosaic animals or chimeric. The transgene may be integrated as a single transgene or as multiple copies such as in concatamers, e.g., head-to-head tandems or head-to-tail tandems. The transgene may also be selectively introduced into and activated in a particular cell type by following, for example, the teaching of Lasko et al. (Lasko et al., Proc. Natl. Acad. Sci. USA 89:6232-6236 (1992)). The regulatory sequences required for such a cell-type specific activation will depend upon the particular cell type of interest, and will be apparent to those of skill in the art. When it is desired that the polynucleotide transgene be integrated into the chromosomal site of the endogenous gene, gene targeting is preferred. Briefly, when such a technique is to be utilized, vectors containing some nucleotide sequences homologous to the endogenous gene are designed for the purpose of integrating, via homologous recombination with chromosomal sequences, into and disrupting the function of the nucleotide sequence of the endogenous gene. The transgene may also be selectively introduced into a particular cell type, thus inactivating the endogenous gene in only that cell type, by following, for example, the teaching of Gu et al. (Gu et al., Science 265:103-106 (1994)). The regulatory sequences required for such a cell-type specific inactivation will depend upon the particular cell type of interest, and will be apparent to those of skill in the art.

[1305] Once transgenic animals have been generated, the expression of the recombinant gene may be assayed utilizing standard techniques. Initial screening may be accomplished by Southern blot analysis or PCR techniques to analyze animal tissues to verify that integration of the transgene has taken place. The level of mRNA expression of the transgene in the tissues of the transgenic animals may also be assessed using techniques which include, but are not limited to, Northern blot analysis of tissue samples obtained from the animal, in situ hybridization analysis, and reverse transcriptase-PCR(RT-PCR).. Samples of transgenic gene-expressing tissue may also be evaluated immunocytochemically or immunohistochemically using antibodies specific for the transgene product.

[1306] Once the founder animals are produced, they may be bred, inbred, outbred, or crossbred to produce colonies of the particular animal. Examples of such breeding strategies include, but are not limited to: outbreeding of founder animals with more than one integration site in order to establish separate lines; inbreeding of separate lines in order to produce compound transgenics that express the transgene at higher levels because of the effects of additive expression of each transgene; crossing of heterozygous transgenic animals to produce animals homozygous for a given integration site in order to both augment expression and eliminate the need for screening of animals by DNA analysis; crossing of separate homozygous lines to produce compound heterozygous or homozygous lines; and breeding to place the transgene on a distinct background that is appropriate for an experimental model of interest.

[1307] Transgenic animals of the invention have uses which include, but are not limited to, animal model systems useful in elaborating the biological function of polypeptides of the present invention, studying diseases, disorders, and/or conditions associated with aberrant expression, and in screening for compounds effective in ameliorating such diseases, disorders, and/or conditions.

### Example 27

### Knock-Out Animals

[1308] Endogenous gene expression can also be reduced by inactivating or “knocking out” the gene and/or its promoter using targeted homologous recombination. (E.g., see Smithies et al., Nature 317:230-234 (1985); Thomas & Capecchi, Cell 51:503-512 (1987); Thompson et al., Cell 5:313-321 (1989); each of which is incorporated by reference herein in its entirety). For example, a mutant, non-functional polynucleotide of the invention (or a completely unrelated DNA sequence) flanked by DNA homologous to the endogenous polynucleotide sequence (either the coding regions or regulatory regions of the gene) can be used, with or without a selectable marker and/or a negative selectable marker, to transfect cells that express polypeptides of the invention in vivo. In another embodiment, techniques known in the art are used to generate knockouts in cells that contain, but do not express the gene of interest. Insertion of the DNA construct, via targeted homologous recombination, results in inactivation of the targeted gene. Such approaches are particularly suited in research and agricultural fields where modifications to embryonic stem cells can be used to generate animal offspring with an inactive targeted gene (e.g., see Thomas & Capecchi 1987 and Thompson 1989, supra). However this approach can be routinely adapted for use in humans provided the recombinant DNA constructs are directly administered or targeted to the required site in vivo using appropriate viral vectors that will be apparent to those of skill in the art.

[1309] In further embodiments of the invention, cells that are genetically engineered to express the polypeptides of the invention, or alternatively, that are genetically engineered not to express the polypeptides of the invention (e.g., knockouts) are administered to a patient in vivo. Such cells may be obtained from the patient (i.e., animal, including human) or an MHC compatible donor and can include, but are not limited to fibroblasts, bone marrow cells, blood cells (e.g., lymphocytes), adipocytes, muscle cells, endothelial cells etc. The cells are genetically engineered in vitro using recombinant DNA techniques to introduce the coding sequence of polypeptides of the invention into the cells, or alternatively, to disrupt the coding sequence and/or endogenous regulatory sequence associated with the polypeptides of the invention, e.g., by transduction (using viral vectors, and preferably vectors that integrate the transgene into the cell genome) or transfection procedures, including, but not limited to, the use of plasmids, cosmids, YACs, naked DNA, electroporation, liposomes, etc. The coding sequence of the polypeptides of the invention can be placed under the control of a strong constitutive or inducible promoter or promoter/enhancer to achieve expression, and preferably secretion, of the polypeptides of the invention. The engineered cells which express and preferably secrete the polypeptides of the invention can be introduced into the patient systemically, e.g., in the circulation, or intraperitoneally.

[1310] Alternatively, the cells can be incorporated into a matrix and implanted in the body, e.g., genetically engineered fibroblasts can be implanted as part of a skin graft; genetically engineered endothelial cells can be implanted as part of a lymphatic or vascular graft. (See, for example, Anderson et al. U.S. Pat. No. 5,399,349; and Mulligan & Wilson, U.S. Pat. No. 5,460,959 each of which is incorporated by reference herein in its entirety).

[1311] When the cells to be administered are non-autologous or non-MHC compatible cells, they can be administered using well known techniques which prevent the development of a host immune response against the introduced cells. For example, the cells may be introduced in an encapsulated form which, while allowing for an exchange of components with the immediate extracellular environment, does not allow the introduced cells to be recognized by the host immune system.

[1312] Transgenic and “knock-out” animals of the invention have uses which include, but are not limited to, animal model systems useful in elaborating the biological function of polypeptides of the present invention, studying diseases, disorders, and/or conditions associated with aberrant expression, and in screening for compounds effective in ameliorating such diseases, disorders, and/or conditions.

### Example 28

### Production Of An Antibody

[1313] a) Hybridoma Technology

[1314] The antibodies of the present invention can be prepared by a variety of methods. (See, Current Protocols, Chapter 2.) As one example of such methods, cells expressing polypeptides of the present invention are administered to an animal to induce the production of sera containing polyclonal antibodies. In a preferred method, a preparation of polypeptides of the present invention is prepared and purified to render it substantially free of natural contaminants. Such a preparation is then introduced into an animal in order to produce polyclonal antisera of greater specific activity.

[1315] Monoclonal antibodies specific for polypeptides of the present invention are prepared using hybridoma technology. (Kohler et al., Nature 256:495 (1975); Kohler et al., Eur. J. Immunol. 6:511 (1976); Kohler et al., Eur. J. Immunol. 6:292 (1976); Hammerling et al., in: Monoclonal Antibodies and T-Cell Hybridomas, Elsevier, N.Y., pp. 563-681 (1981)). In general, an animal (preferably a mouse) is immunized with polypeptides of the present invention or, more preferably, with a secreted polypeptide of the present invention -expressing cell. Such polypeptide-expressing cells are cultured in any suitable tissue culture medium, preferably in Earle's modified Eagle's medium supplemented with 10% fetal bovine serum (inactivated at about 56° C.), and supplemented with about 10 g/l of nonessential amino acids, about 1,000 U/ml of penicillin, and about 100 μg/ml of streptomycin.

[1316] The splenocytes of such mice are extracted and fused with a suitable myeloma cell line. Any suitable myeloma cell line may be employed in accordance with the present invention; however, it is preferable to employ the parent myeloma cell line (SP20), available from the ATCC. After fusion, the resulting hybridoma cells are selectively maintained in HAT medium, and then cloned by limiting dilution as described by Wands et al. (Gastroenterology 80:225-232 (1981)). The hybridoma cells obtained through such a selection are then assayed to identify clones which secrete antibodies capable of binding the polypeptides of the present invention.

[1317] Alternatively, additional antibodies capable of binding to polypeptides of the present invention can be produced in a two-step procedure using anti-idiotypic antibodies. Such a method makes use of the fact that antibodies are themselves antigens, and therefore, it is possible to obtain an antibody that binds to a second antibody. In accordance with this method, protein specific antibodies are used to immunize an animal, preferably a mouse. The splenocytes of such an animal are then used to produce hybridoma cells, and the hybridoma cells are screened to identify clones which produce an antibody whose ability to bind to the polypeptides of the present invention -specific antibody can be blocked by polypeptides of the present invention. Such antibodies comprise anti-idiotypic antibodies to the polypeptides of the present invention protein-specific antibody and are used to immunize an animal to induce formation of further polypeptides of the present invention protein-specific antibodies.

[1318] For in vivo use of antibodies in humans, an antibody is “humanized”. Such antibodies can be produced using genetic constructs derived from hybridoma cells producing the monoclonal antibodies described above. Methods for producing chimeric and humanized antibodies are known in the art and are discussed herein. (See, for review, Morrison, Science 229:1202 (1985); Oi et al., BioTechniques 4:214 (1986); Cabilly et al., U.S. Pat. No. 4,816,567; Taniguchi et al., EP 171496; Morrison et al., EP 173494; Neuberger et al., WO 8601533; Robinson et al., WO 8702671; Boulianne et al., Nature 312:643 (1984); Neuberger et al., Nature 314:268 (1985).)

[1319] b) Isolation Of Antibody Fragments Directed

[1320] Against polypeptides of the present invention From A Library Of scFvs

[1321] Naturally occurring V-genes isolated from human PBLs are constructed into a library of antibody fragments which contain reactivities against polypeptides of the present invention to which the donor may or may not have been exposed (see e.g., U.S. Pat. No. 5,885,793 incorporated herein by reference in its entirety).

[1322] Rescue of the Library. A library of scFvs is constructed from the RNA of human PBLs as described in PCT publication WO 92/01047. To rescue phage displaying antibody fragments, approximately 109 E. coli harboring the phagemid are used to inoculate 50 ml of 2×TY containing 1% glucose and 100 μg/ml of ampicillin (2×TY-AMP-GLU) and grown to an O.D. of 0.8 with shaking. Five ml of this culture is used to inoculate 50 ml of 2×TY-AMP-GLU, 2×108 TU of delta gene 3 helper (M13 delta gene III, see PCT publication WO 92/01047) are added and the culture incubated at 37° C. for 45 minutes without shaking and then at 37° C. for 45 minutes with shaking. The culture is centrifuged at 4000 r.p.m. for 10 min. and the pellet resuspended in 2 liters of 2×TY containing 100 μg/ml ampicillin and 50 ug/ml kanamycin and grown overnight. Phage are prepared as described in PCT publication WO 92/01047.

[1323] M13 delta gene III is prepared as follows: M13 delta gene III helper phage does not encode gene III protein, hence the phage(mid) displaying antibody fragments have a greater avidity of binding to antigen. Infectious Ml 3 delta gene III particles are made by growing the helper phage in cells harboring a pUC19 derivative supplying the wild type gene III protein during phage morphogenesis. The culture is incubated for 1 hour at 37° C. without shaking and then for a further hour at 37° C. with shaking. Cells are spun down (IEC-Centra 8,400 r.p.m. for 10 min), resuspended in 300 ml 2×TY broth containing 100 μg ampicillin/ml and 25 μg kanamycin/ml (2×TY-AMP-KAN) and grown overnight, shaking at 37° C. Phage particles are purified and concentrated from the culture medium by two PEG-precipitations (Sambrook et al., 1990), resuspended in 2 ml PBS and passed through a 0.45 μm filter (Minisart NML; Sartorius) to give a final concentration of approximately 1013 transducing units/ml (ampicillin-resistant clones).

[1324] Panning of the Library. Immunotubes (Nunc) are coated overnight in PBS with 4 ml of either 100 μg/ml or 10 μg/ml of a polypeptide of the present invention. Tubes are blocked with 2% Marvel-PBS for 2 hours at 37° C. and then washed 3 times in PBS. Approximately 1013 TU of phage is applied to the tube and incubated for 30 minutes at room temperature tumbling on an over and under turntable and then left to stand for another 1.5 hours. Tubes are washed 10 times with PBS 0.1% Tween-20 and 10 times with PBS. Phage are eluted by adding 1 ml of 100 mM triethylamine and rotating 15 minutes on an under and over turntable after which the solution is immediately neutralized with 0.5 ml of 1.0M Tris-HCl, pH 7.4. Phage are then used to infect 10 ml of mid-log E. coli TG1 by incubating eluted phage with bacteria for 30 minutes at 37° C. The E. coli are then plated on TYE plates containing 1% glucose and 100 μg/ml ampicillin. The resulting bacterial library is then rescued with delta gene 3 helper phage as described above to prepare phage for a subsequent round of selection. This process is then repeated for a total of 4 rounds of affinity purification with tube-washing increased to 20 times with PBS, 0.1% Tween-20 and 20 times with PBS for rounds 3 and 4.

[1325] Characterization of Binders. Eluted phage from the 3rd and 4th rounds of selection are used to infect E. coli HB2151 and soluble scFv is produced (Marks, et al., 1991) from single colonies for assay. ELISAs are performed with microtitre plates coated with either 10 pg/ml of the polypeptide of the present invention in 50 mM bicarbonate pH 9.6. Clones positive in ELISA are further characterized by PCR fingerprinting (see, e.g., PCT publication WO 92/01047) and then by sequencing. These ELISA positive clones may also be further characterized by techniques known in the art, such as, for example, epitope mapping, binding affinity, receptor signal transduction, ability to block or competitively inhibit antibody/antigen binding, and competitive agonistic or antagonistic activity.

### Example 29

### Biological Effects of Polypeptides of the Invention

[1326] Fibroblast and endothelial cell assays.

[1327] Human lung fibroblasts are obtained from Clonetics (San Diego, Calif.) and maintained in growth media from Clonetics. Dermal microvascular endothelial cells are obtained from Cell Applications (San Diego, Calif.). For proliferation assays, the human lung fibroblasts and dermal microvascular endothelial cells can be cultured at 5,000 cells/well in a 96-well plate for one day in growth medium. The cells are then incubated for one day in 0.1% BSA basal medium. After replacing the medium with fresh 0.1% BSA medium, the cells are incubated with the test proteins for 3 days. Alamar Blue (Alamar Biosciences, Sacramento, Calif.) is added to each well to a final concentration of 10%. The cells are incubated for 4 hr. Cell viability is measured by reading in a CytoFluor fluorescence reader. For the PGE2 assays, the human lung fibroblasts are cultured at 5,000 cells/well in a 96-well plate for one day. After a medium change to 0.1% BSA basal medium, the cells are incubated with FGF-2 or polypeptides of the invention with or without IL-1( for 24 hours. The supernatants are collected and assayed for PGE2 by EIA kit (Cayman, Ann Arbor, Mich.). For the IL-6 assays, the human lung fibroblasts are cultured at 5,000 cells/well in a 96-well plate for one day. After a medium change to 0.1% BSA basal medium, the cells are incubated with FGF-2 or with or without polypeptides of the invention IL-1( for 24 hours. The supernatants are collected and assayed for IL-6 by ELISA kit (Endogen, Cambridge, Mass.).

[1328] Human lung fibroblasts are cultured with FGF-2 or polypeptides of the invention for 3 days in basal medium before the addition of Alamar Blue to assess effects on growth of the fibroblasts. FGF-2 should show a stimulation at 10 - 2500 ng/ml which can be used to compare stimulation with polypeptides of the invention.

[1329] Parkinson Models.

[1330] The loss of motor function in Parkinson's disease is attributed to a deficiency of striatal dopamine resulting from the degeneration of the nigrostriatal dopaminergic projection neurons. An animal model for Parkinson's that has been extensively characterized involves the systemic administration of 1-methyl-4 phenyl 1, 2, 3, 6-tetrahydropyridine (MPTP). In the CNS, MPTP is taken-up by astrocytes and catabolized by monoamine oxidase B to 1-methyl-4-phenyl pyridine (MPP+) and released. Subsequently, MPP+ is actively accumulated in dopaminergic neurons by the high-affinity reuptake transporter for dopamine. MPP+ is then concentrated in mitochondria by the electrochemical gradient and selectively inhibits nicotidamide adenine disphosphate: ubiquinone oxidoreductionase (complex I), thereby interfering with electron transport and eventually generating oxygen radicals.

[1331] It has been demonstrated in tissue culture paradigms that FGF-2 (basic FGF) has trophic activity towards nigral doparninergic neurons (Ferrari et al., Dev. Biol. 1989). Recently, Dr. Unsicker's group has demonstrated that administering FGF-2 in gel foam implants in the striatum results in the near complete protection of nigral dopaminergic neurons from the toxicity associated with MPTP exposure (Otto and Unsicker, J. Neuroscience, 1990).

[1332] Based on the data with FGF-2, polypeptides of the invention can be evaluated to determine whether it has an action similar to that of FGF-2 in enhancing dopaminergic neuronal survival in vitro and it can also be tested in vivo for protection of dopaminergic neurons in the striatum from the damage associated with MPTP treatment. The potential effect of a polypeptide of the invention is first examined in vitro in a dopaminergic neuronal cell culture paradigm. The cultures are prepared by dissecting the midbrain floor plate from gestation day 14 Wistar rat embryos. The tissue is dissociated with trypsin and seeded at a density of 200,000 cells/cm2 on polyorthinine-laminin coated glass coverslips. The cells are maintained in Dulbecco's Modified Eagle's medium and F12 medium containing hormonal supplements (N1). The cultures are fixed with paraformaldehyde after 8 days in vitro and are processed for tyrosine hydroxylase, a specific marker for dopaminergic neurons, immunohistochemical staining. Dissociated cell cultures are prepared from embryonic rats. The culture medium is changed every third day and the factors are also added at that time.

[1333] Since the dopaminergic neurons are isolated from animals at gestation day 14, a developmental time which is past the stage when the dopaminergic precursor cells are proliferating, an increase in the number of tyrosine hydroxylase immunopositive neurons would represent an increase in the number of dopaminergic neurons surviving in vitro. Therefore, if a polypeptide of the invention acts to prolong the survival of dopaminergic neurons, it would suggest that the polypeptide may be involved in Parkinson's Disease.

[1334] One skilled in the art could easily modify the exemplified studies to test the activity of polynucleotides of the invention (e.g., gene therapy), agonists, and/or antagonists of polynucleotides or polypeptides of the invention.

### Example 30

### The Effect Of The Polypeptides Of The Invention On The Growth Of Vascular Endothelial Cells

[1335] On day 1, human umbilical vein endothelial cells (HUVEC) are seeded at 2-5×104 cells/35 mm dish density in M199 medium containing 4% fetal bovine serum (FBS), 16 units/ml heparin, and 50 units/ml endothelial cell growth supplements (ECGS, Biotechnique, Inc.). On day 2, the medium is replaced with M199 containing 10% FBS, 8 units/ml heparin. A polypeptide having the amino acid sequence described herein, and positive controls, such as VEGF and basic FGF (bFGF) are added, at varying concentrations. On days 4 and 6, the medium is replaced. On day 8, cell number is determined with a Coulter Counter.

[1336] An increase in the number of HUVEC cells indicates that the polypeptide of the invention may proliferate vascular endothelial cells.

[1337] One skilled in the art could easily modify the exemplified studies to test the activity of polynucleotides of the invention (e.g., gene therapy), agonists, and/or antagonists of polynucleotides or polypeptides of the invention.

### Example 31

### Stimulatory Effect Of Polypeptides Of The Invention On The Proliferation Of Vascular Endothelial Cells

[1338] For evaluation of mitogenic activity of growth factors, the calorimetric MTS (3-(4,5-dimethylthiazol-2-yl)-5-(3-carboxymethoxyphenyl)-2-(4-sulfophenyl)2H-tetrazolium) assay with the electron coupling reagent PMS (phenazine methosulfate) was performed (CellTiter 96 AQ, Promega). Cells are seeded in a 96-well plate (5,000 cells/well) in 0.1 mL serum-supplemented medium and are allowed to attach overnight. After serum-starvation for 12 hours in.0.5% FBS, conditions (bFGF, VEGF165 or a polypeptide of the invention in 0.5% FBS) with or without Heparin (8 U/ml) are added to wells for 48 hours. 20 mg of MTS/PMS mixture (1:0.05) are added per well and allowed to incubate for 1 hour at 37° C. before measuring the absorbance at 490 nm in an ELISA plate reader. Background absorbance from control wells (some media, no cells) is subtracted, and seven wells are performed in parallel for each condition. See, Leak et al. In Vitro Cell. Dev. Biol. 30A:512-518 (1994).

[1339] One skilled in the art could easily modify the exemplified studies to test the activity of polynucleotides of the invention (e.g., gene therapy), agonists, and/or antagonists of polynucleotides or polypeptides of the invention.

### Example 32

### Inhibition Of PDGF-Induced Vascular Smooth Muscle Cell Proliferation Stimulatory Effect

[1340] HAoSMC proliferation can be measured, for example, by BrdUrd incorporation. Briefly, subconfluent, quiescent cells grown on the 4-chamber slides are transfected with CRP or FITC-labeled AT2-3LP. Then, the cells are pulsed with 10% calf serum and 6 mg/ml BrdUrd. After 24 h, immunocytochemistry is performed by using BrdUrd Staining Kit (Zymed Laboratories). In brief, the cells are incubated with the biotinylated mouse anti-BrdUrd antibody at 4 degrees C. for 2 h after being exposed to denaturing solution and then incubated with the streptavidin-peroxidase and diaminobenzidine. After counterstaining with hematoxylin, the cells are mounted for microscopic examination, and the BrdUrd-positive cells are counted. The BrdUrd index is calculated as a percent of the BrdUrd-positive cells to the total cell number. In addition, the simultaneous detection of the BrdUrd staining (nucleus) and the FITC uptake (cytoplasm) is performed for individual cells by the concomitant use of bright field illumination and dark field-UV fluorescent illumination. See, Hayashida et al., J. Biol. Chem... 6:271(36):21985-21992 (1996).

[1341] One skilled in the art could easily modify the exemplified studies to test the activity of polynucleotides of the invention (e.g., gene therapy), agonists, and/or antagonists of polynucleotides or polypeptides of the invention.

### Example 33

### Stimulation Of Endothelial Migration

[1342] This example will be used to explore the possibility that a polypeptide of the invention may stimulate lymphatic endothelial cell migration.

[1343] Endothelial cell migration assays are performed using a 48 well microchemotaxis chamber (Neuroprobe Inc., Cabin John, M.D.; Falk, W., et al., J. Immunological Methods 1980;33:239-247). Polyvinylpyrrolidone-free polycarbonate filters with a pore size of 8 um (Nucleopore Corp. Cambridge, Mass.) are coated with 0.1% gelatin for at least 6 hours at room temperature and dried under sterile air. Test substances are diluted to appropriate concentrations in M199 supplemented with 0.25% bovine serum albumin (BSA), and 25 ul of the final dilution is placed in the lower chamber of the modified Boyden apparatus. Subconfluent, early passage (2-6) HUVEC or BMEC cultures are washed and trypsinized for the minimum time required to achieve cell detachment. After placing the filter between lower and upper chamber, 2.5×105 cells suspended in 50 ul M199 containing 1% FBS are seeded in the upper compartment. The apparatus is then incubated for 5 hours at 37° C. in a humidified chamber with 5% CO2 to allow cell migration. After the incubation period, the filter is removed and the upper side of the filter with the non-migrated cells is scraped with a rubber policeman. The filters are fixed with methanol and stained with a Giemsa solution (Diff-Quick, Baxter, McGraw Park, Ill.). Migration is quantified by counting cells of three random high-power fields (40x) in each well, and all groups are performed in quadruplicate.

[1344] One skilled in the art could easily modify the exemplified studies to test the activity of polynucleotides of the invention (e.g., gene therapy), agonists, and/or antagonists of polynucleotides or polypeptides of the invention.

### Example 34

### Stimulation Of Nitric Oxide Production By Endothelial Cells

[1345] Nitric oxide released by the vascular endothelium is believed to be a mediator of vascular endothelium relaxation. Thus, activity of a polypeptide of the invention can be assayed by determining nitric oxide production by endothelial cells in response to the polypeptide.

[1346] Nitric oxide is measured in 96-well plates of confluent microvascular endothelial cells after 24 hours starvation and a subsequent 4 hr exposure to various levels of a positive control (such as VEGF-1) and the polypeptide of the invention. Nitric oxide in the medium is determined by use of the Griess reagent to measure total nitrite after reduction of nitric oxide-derived nitrate by nitrate reductase. The effect of the polypeptide of the invention on nitric oxide release is examined on HUVEC.

[1347] Briefly, NO release from cultured HUVEC monolayer is measured with a NO-specific polarographic electrode connected to a NO meter (Iso-NO, World Precision Instruments Inc.) (1049). Calibration of the NO elements is performed according to the following equation:

2KNO2+2KI+2H2SO462NO+I2+2H2O+2K2SO4

[1348] The standard calibration curve is obtained by adding graded concentrations of KNO2 (0, 5, 10, 25, 50, 100, 250, and 500 nmol/L) into the calibration solution containing KI and H2SO4. The specificity of the Iso-NO electrode to NO is previously determined by measurement of NO from authentic NO gas (1050). The culture medium is removed and HUVECs are washed twice with Dulbecco's phosphate buffered saline. The cells are then bathed in 5 ml of filtered Krebs-Henseleit solution in 6-well plates, and the cell plates are kept on a slide warmer (Lab Line Instruments Inc.) To maintain the temperature at 37° C. The NO sensor probe is inserted vertically into the wells, keeping the tip of the electrode 2 mm under the surface of the solution, before addition of the different conditions. S-nitroso acetyl penicillamin (SNAP) is used as a positive control. The amount of released NO is expressed as picomoles per 1×106 endothelial cells. All values reported are means of four to six measurements in each group (number of cell culture wells). See, Leak et al. Biochem. and Biophys. Res. Comm. 217:96-105 (1995).

[1349] One skilled in the art could easily modify the exemplified studies to test the activity of polynucleotides of the invention (e.g., gene therapy), agonists, and/or antagonists of polynucleotides or polypeptides of the invention.

### Example 35

### Effect Of Polypepides Of The Invention On Cord Formation In Angiogenesis

[1350] Another step in angiogenesis is cord formation, marked by differentiation of endothelial cells. This bioassay measures the ability of microvascular endothelial cells to form capillary-like structures (hollow structures) when cultured in vitro.

[1351] CADMEC (microvascular endothelial cells) are purchased from Cell Applications, Inc. as proliferating (passage 2) cells and are cultured in Cell Applications' CADMEC Growth Medium and used at passage 5. For the in vitro angiogenesis assay, the wells of a 48-well cell culture plate are coated with Cell Applications' Attachment Factor Medium (200 ml/well) for 30 min. at 37° C. CADMEC are seeded onto the coated wells at 7,500 cells/well and cultured overnight in Growth Medium. The Growth Medium is then replaced with 300 mg Cell Applications' Chord Formation Medium containing control buffer or a polypeptide of the invention (0.1 to 100 ng/ml) and the cells are cultured for an additional 48 hr. The numbers and lengths of the capillary-like chords are quantitated through use of the Boeckeler VIA-170 video image analyzer. All assays are done in triplicate.

[1352] Commercial (R&D) VEGF (50 ng/ml) is used as a positive control. b-esteradiol (1 ng/ml) is used as a negative control. The appropriate buffer (without protein) is also utilized as a control.

[1353] One skilled in the art could easily modify the exemplified studies to test the activity of polynucleotides of the invention (e.g., gene therapy), agonists, and/or antagonists of polynucleotides or polypeptides of the invention.

### Example 36

### Angiogenic Effect On Chick Chorioallantoic Membrane

[1354] Chick chorioallantoic membrane (CAM) is a well-established system to examine angiogenesis. Blood vessel formation on CAM is easily visible and quantifiable. The ability of polypeptides of the invention to stimulate angiogenesis in CAM can be examined.

[1355] Fertilized eggs of the White Leghorn chick (Gallus gallus) and the Japanese qual (Cotumix coturnix) are incubated at 37.8° C. and 80% humidity. Differentiated CAM of 16-day-old chick and 13-day-old qual embryos is studied with the following methods.

[1356] On Day 4 of development, a window is made into the egg shell of chick eggs. The embryos are checked for normal development and the eggs sealed with cellotape. They are further incubated until Day 13. Thermanox coverslips (Nunc, Naperville, Ill.) are cut into disks of about 5 mm in diameter. Sterile and salt-free growth factors are dissolved in distilled water and about 3.3 mg/ 5 ml are pipetted on the disks. After air-drying, the inverted disks are applied on CAM. After 3 days, the specimens are fixed in 3% glutaraldehyde and 2% formaldehyde and rinsed in 0.12 M sodium cacodylate buffer. They are photographed with a stereo microscope [Wild M8] and embedded for semi- and ultrathin sectioning as described above. Controls are performed with carrier disks alone.

[1357] One skilled in the art could easily modify the exemplified studies to test the activity of polynucleotides of the invention (e.g., gene therapy), agonists, and/or antagonists of polynucleotides or polypeptides of the invention.

### Example 37

### Angiogenesis Assay Using A Matrigel Implant In Mouse

[1358] In vivo angiogenesis assay of a polypeptide of the invention measures the ability of an existing capillary network to form new vessels in an implanted capsule of murine extracellular matrix material (Matrigel). The protein is mixed with the liquid Matrigel at 4 degree C. and the mixture is then injected subcutaneously in mice where it solidifies. After 7 days, the solid “plug” of Matrigel is removed and examined for the presence of new blood vessels. Matrigel is purchased from Becton Dickinson Labware/Collaborative Biomedical Products.

[1359] When thawed at 4 degree C. the Matrigel material is a liquid. The Matrigel is mixed with a polypeptide of the invention at 150 ng/ml at 4 degrees C. and drawn into cold 3 ml syringes. Female C57B1/6 mice approximately 8 weeks old are injected with the mixture of Matrigel and experimental protein at 2 sites at the midventral aspect of the abdomen (0.5 ml/site). After 7 days, the mice are sacrificed by cervical dislocation, the Matrigel plugs are removed and cleaned (i.e., all clinging membranes and fibrous tissue is removed). Replicate whole plugs are fixed in neutral buffered 10% formaldehyde, embedded in paraffin and used to produce sections for histological examination after staining with Masson's Trichrome. Cross sections from 3 different regions of each plug are processed. Selected sections are stained for the presence of vWF. The positive control for this assay is bovine basic FGF (150 ng/ml). Matrigel alone is used to determine basal levels of angiogenesis.

[1360] One skilled in the art could easily modify the exemplified studies to test the activity of polynucleotides of the invention (e.g., gene therapy), agonists, and/or antagonists of polynucleotides or polypeptides of the invention.

### Example 38

### Rescue Of Ischemia In Rabbit Lower Limb Model

[1361] To study the in vivo effects of polynucleotides and polypeptides of the invention on ischemia, a rabbit hindlimb ischemia model is created by surgical removal of one femoral arteries as described previously (Takeshita et al., Am J. Pathol 147:1649-1660 (1995)). The excision of the femoral artery results in retrograde propagation of thrombus and occlusion of the external iliac artery. Consequently, blood flow to the ischemic limb is dependent upon collateral vessels originating from the internal iliac artery (Takeshitaet al. Am J. Pathol 147:1649-1660 (1995)). An interval of 10 days is allowed for post-operative recovery of rabbits and development of endogenous collateral vessels. At 10 day post-operatively (day 0), after performing a baseline angiogram, the internal iliac artery of the ischemic limb is transfected with 500 mg naked expression plasmid containing a polynucleotide of the invention by arterial gene transfer technology using a hydrogel-coated balloon catheter as described (Riessen et al. Hum Gene Ther. 4:749-758 (1993); Leclerc et al. J. Clin. Invest. 90: 936-944 (1992)). When a polypeptide of the invention is used in the treatment, a single bolus of 500 mg polypeptide of the invention or control is delivered into the internal iliac artery of the ischemic limb over a period of 1 min. through an infusion catheter. On day 30, various parameters are measured in these rabbits: (a) BP ratio—The blood pressure ratio of systolic pressure of the ischemic limb to that of normal limb; (b) Blood Flow and Flow Reserve - Resting FL: the blood flow during undilated condition and Max FL: the blood flow during fully dilated condition (also an indirect measure of the blood vessel amount) and Flow Reserve is reflected by the ratio of max FL: resting FL; (c) Angiographic Score—This is measured by the angiogram of collateral vessels. A score is determined by the percentage of circles in an overlaying grid that with crossing opacified arteries divided by the total number m the rabbit thigh; (d) Capillary density—The number of collateral capillaries determined in light microscopic sections taken from hindlimbs.

[1362] One skilled in the art could easily modify the exemplified studies to test the activity of polynucleotides of the invention (e.g., gene therapy), agonists, and/or antagonists of polynucleotides or polypeptides of the invention.

### Example 39

### Effect Of Polypeptides Of The Invention On Vasodilation

[1363] Since dilation of vascular endothelium is important in reducing blood pressure, the ability of polypeptides of the invention to affect the blood pressure in spontaneously hypertensive rats (SHR) is examined. Increasing doses (0, 10, 30, 100, 300, and 900 mg/kg) of the polypeptides of the invention are administered to 13-14 week old spontaneously hypertensive rats (SHR). Data are expressed as the mean +/− SEM. Statistical analysis are performed with a paired t-test and statistical significance is defined as p<0.05 vs. the response to buffer alone.

[1364] One skilled in the art could easily modify the exemplified studies to test the activity of polynucleotides of the invention (e.g., gene therapy), agonists, and/or antagonists of polynucleotides or polypeptides of the invention.

### Example 40

### Rat Ischemic Skin Flap Model

[1365] The evaluation parameters include skin blood flow, skin temperature, and factor VIII immunohistochemistry or endothelial alkaline phosphatase reaction. Expression of polypeptides of the invention, during the skin ischemia, is studied using in situ hybridization.

[1366] The study in this model is divided into three parts as follows:

[1367] a) Ischemic skin

[1368] b) Ischemic skin wounds

[1369] c) Normal wounds

[1370] The experimental protocol includes:

[1371] a) Raising a 3×4 cm, single pedicle full-thickness random skin flap (myocutaneous flap over the lower back of the animal).

[1372] b) An excisional wounding (4-6 mm in diameter) in the ischemic skin (skin-flap).

[1373] c) Topical treatment with a polypeptide of the invention of the excisional wounds (day 0, 1, 2, 3, 4 post-wounding) at the following various dosage ranges: 1 mg to 100 mg.

[1374] d) Harvesting the wound tissues at day 3, 5, 7, 10, 14 and 21 post-wounding for histological, immunohistochemical, and in situ studies. One skilled in the art could easily modify the exemplified studies to test the activity of polynucleotides of the invention (e.g., gene therapy), agonists, and/or antagonists of polynucleotides or polypeptides of the invention.

### Example 41

### Peripheral Arterial Disease Model

[1375] Angiogenic therapy using a polypeptide of the invention is a novel therapeutic strategy to obtain restoration of blood flow around the ischemia in case of peripheral arterial diseases. The experimental protocol includes:

[1376] a) One side of the femoral artery is ligated to create ischemic muscle of the hindlimb, the other side of hindlimb serves as a control.

[1377] b) a polypeptide of the invention, in a dosage range of 20 mg-500 mg, is delivered intravenously and/or intramuscularly 3 times (perhaps more) per week for 2-3 weeks.

[1378] c) The ischemic muscle tissue is collected after ligation of the femoral artery at 1, 2, and 3 weeks for the analysis of expression of a polypeptide of the invention and histology. Biopsy is also performed on the other side of normal muscle of the contralateral hindlimb.

[1379] One skilled in the art could easily modify the exemplified studies to test the activity of polynucleotides of the invention (e.g., gene therapy), agonists, and/or antagonists of polynucleotides or polypeptides of the invention.

### Example 42

### Ischemic Myocardial Disease Model

[1380] A polypeptide of the invention is evaluated as a potent mitogen capable of stimulating the development of collateral vessels, and restructuring new vessels after coronary artery occlusion. Alteration of expression of the polypeptide is investigated in situ. The experimental protocol includes:

[1381] a) The heart is exposed through a left-side thoracotomy in the rat. Immediately, the left coronary artery is occluded with a thin suture (6-0) and the thorax is closed.

[1382] b) a polypeptide of the invention, in a dosage range of 20 mg-500 mg, is delivered intravenously and/or intramuscularly 3 times (perhaps more) per week for 2-4 weeks.

[1383] c) Thirty days after the surgery, the heart is removed and cross-sectioned for morphometric and in situ analyzes.

[1384] One skilled in the art could easily modify the exemplified studies to test the activity of polynucleotides of the invention (e.g., gene therapy), agonists, and/or antagonists of polynucleotides or polypeptides of the invention.

### Example 43

### Rat Corneal Wound Healing Model

[1385] This animal model shows the effect of a polypeptide of the invention on neovascularization. The experimental protocol includes:

[1386] a) Making a 1-1.5 mm long incision from the center of cornea into the stromal layer.

[1387] b) Inserting a spatula below the lip of the incision facing the outer corner of the eye.

[1388] c) Making a pocket (its base is 1-1.5 mm form the edge of the eye).

[1389] d) Positioning a pellet, containing 50 ng- 5 ug of a polypeptide of the invention, within the pocket.

[1390] e) Treatment with a polypeptide of the invention can also be applied topically to the corneal wounds in a dosage range of 20 mg - 500 mg (daily treatment for five days).

[1391] One skilled in the art could easily modify the exemplified studies to test the activity of polynucleotides of the invention (e.g., gene therapy), agonists, and/or antagonists of polynucleotides or polypeptides of the invention.

### Example 44

### Diabetic Mouse and Glucocorticoid-Impaired Wound Healing Models

### A. Diabetic db+/db+ Mouse Model

[1392] To demonstrate that a polypeptide of the invention accelerates the healing process, the genetically diabetic mouse model of wound healing is used. The full thickness wound healing model in the db+/db+ mouse is a well characterized, clinically relevant and reproducible model of impaired wound healing. Healing of the diabetic wound is dependent on formation of granulation tissue and re-epithelialization rather than contraction (Gartner, M. H. et al., J. Surg. Res. 52:389 (1992); Greenhalgh, D. G. et al., Am. J. Pathol. 136:1235 (1990)).

[1393] The diabetic animals have many of the characteristic features observed in Type II diabetes mellitus. Homozygous (db+/db+) mice are obese in comparison to their normal heterozygous (db+/+m) littermates. Mutant diabetic (db+/db+) mice have a single autosomal recessive mutation on chromosome 4 (db+) (Coleman et al. Proc. Natl. Acad. Sci. USA 77:283-293 (1982)). Animals show polyphagia, polydipsia and polyuria. Mutant diabetic mice (db+/db+) have elevated blood glucose, increased or normal insulin levels, and suppressed cell-mediated immunity (Mandel et al., J. Immunol. 120:1375 (1978); Debray-Sachs, M. et al., Clin. Exp. Immunol. 51(l):1-7 (1983); Leiter et al., Am. J. of Pathol. 114:46-55 (1985)). Peripheral neuropathy, myocardial complications, and microvascular lesions, basement membrane thickening and glomerular filtration abnormalities have been described in these animals (Norido, F. et al., Exp. Neurol. 83(2):221-232 (1984); Robertson et al., Diabetes 29(1):60-67 (1980); Giacomelli et al., Lab Invest. 40(4):460-473 (1979); Coleman, D. L., Diabetes 31 (Suppl): 1-6 (1982)). These homozygous diabetic mice develop hyperglycemia that is resistant to insulin analogous to human type II diabetes (Mandel et al., J. Immunol. 120:1375-1377 (1978)).

[1394] The characteristics observed in these animals suggests that healing in this model may be similar to the healing observed in human diabetes (Greenhalgh, et al., Am. J. of Pathol. 136:1235-1246 (1990)).

[1395] Genetically diabetic female C57BL/KsJ (db+/db+) mice and their non-diabetic (db+/+m) heterozygous littermates are used in this study (Jackson Laboratories). The animals are purchased at 6 weeks of age and are 8 weeks old at the beginning of the study. Animals are individually housed and received food and water ad libitum. All manipulations are performed using aseptic techniques. The experiments are conducted according to the rules and guidelines of Bristol-Myers Squibb Company's Institutional Animal Care and Use Committee and the Guidelines for the Care and Use of Laboratory Animals.

[1396] Wounding protocol is performed according to previously reported methods (Tsuboi, R. and Rifkin, D. B., J. Exp. Med. 172:245-251 (1990)). Briefly, on the day of wounding, animals are anesthetized with an intraperitoneal injection of Avertin (0.01 mg/mL), 2, 2, 2-tribromoethanol and 2-methyl-2-butanol dissolved in deionized water. The dorsal region of the animal is shaved and the skin washed with 70% ethanol solution and iodine. The surgical area is dried with sterile gauze prior to wounding. An 8 mm full-thickness wound is then created using a Keyes tissue punch. Immediately following wounding, the surrounding skin is gently stretched to eliminate wound expansion. The wounds are left open for the duration of the experiment. Application of the treatment is given topically for 5 consecutive days commencing on the day of wounding. Prior to treatment, wounds are gently cleansed with sterile saline and gauze sponges.

[1397] Wounds are visually examined and photographed at a fixed distance at the day of surgery and at two day intervals thereafter. Wound closure is determined by daily measurement on days 1-5 and on day 8. Wounds are measured horizontally and vertically using a calibrated Jameson caliper. Wounds are considered healed if granulation tissue is no longer visible and the wound is covered by a continuous epithelium.

[1398] A polypeptide of the invention is administered using at a range different doses, from 4mg to 500 mg per wound per day for 8 days in vehicle. Vehicle control groups received 50 mL of vehicle solution.

[1399] Animals are euthanized on day 8 with an intraperitoneal injection of sodium pentobarbital (300 mg/kg). The wounds and surrounding skin are then harvested for histology and immunohistochemistry. Tissue specimens are placed in 10% neutral buffered formalin in tissue cassettes between biopsy sponges for further processing.

[1400] Three groups of 10 animals each (5 diabetic and 5 non-diabetic controls) are evaluated: 1) Vehicle placebo control, 2) untreated group, and 3) treated group.

[1401] Wound closure is analyzed by measuring the area in the vertical and horizontal axis and obtaining the total square area of the wound. Contraction is then estimated by establishing the differences between the initial wound area (day 0) and that of post treatment (day 8). The wound area on day 1 is 64 mm2, the corresponding size of the dermal punch. Calculations are made using the following formula:

[1402] [Open area on day 8]-[Open area on day 1]/[Open area on day 1]

[1403] Specimens are fixed in 10% buffered formalin and paraffin embedded blocks are sectioned perpendicular to the wound surface (5 mm) and cut using a Reichert-Jung microtome. Routine hematoxylin-eosin (H&E) staining is performed on cross-sections of bisected wounds. Histologic examination of the wounds are used to assess whether the healing process and the morphologic appearance of the repaired skin is altered by treatment with a polypeptide of the invention. This assessment included verification of the presence of cell accumulation, inflammatory cells, capillaries, fibroblasts, re-epithelialization and epidermal maturity (Greenhalgh, D. G. et al., Am. J. Pathol. 136:1235 (1990)). A calibrated lens micrometer is used by a blinded observer.

[1404] Tissue sections are also stained immunohistochemically with a polyclonal rabbit anti-human keratin antibody using ABC Elite detection system. Human skin is used as a positive tissue control while non-immune IgG is used as a negative control. Keratinocyte growth is determined by evaluating the extent of reepithelialization of the wound using a calibrated lens micrometer.

[1405] Proliferating cell nuclear antigen/cyclin (PCNA) in skin specimens is demonstrated by using anti-PCNA antibody (1:50) with an ABC Elite detection system. Human colon cancer can serve as a positive tissue control and human brain tissue can be used as a negative tissue control. Each specimen includes a section with omission of the primary antibody and substitution with non-immune mouse IgG. Ranking of these sections is based on the extent of proliferation on a scale of 0-8, the lower side of the scale reflecting slight proliferation to the higher side reflecting intense proliferation.

[1406] Experimental data are analyzed using an unpaired t test. A p value of <0.05 is considered significant.

### B. Steroid Impaired Rat Model

[1407] The inhibition of wound healing by steroids has been well documented in various in vitro and in vivo systems (Wahl, Glucocorticoids and Wound healing. In: Anti-Inflammatory Steroid Action: Basic and Clinical Aspects. 280-302 (1989); Wahlet al., J. Immunol. 115: 476-481 (1975); Werb et al., J. Exp. Med. 147:1684-1694 (1978)). Glucocorticoids retard wound healing by inhibiting angiogenesis, decreasing vascular permeability (Ebert et al., An. Intern. Med. 37:701-705 (1952)), fibroblast proliferation, and collagen synthesis (Beck et al., Growth Factors. 5: 295-304 (1991); Haynes et al., J. Clin. Invest. 61: 703-797 (1978)) and producing a transient reduction of circulating monocytes (Haynes et al., J. Clin. Invest. 61: 703-797 (1978); Wahl, “Glucocorticoids and wound healing”, In: Antiinflammatory Steroid Action: Basic and Clinical Aspects, Academic Press, New York, pp. 280-302 (1989)). The systemic administration of steroids to impaired wound healing is a well establish phenomenon in rats (Beck et al., Growth Factors. 5: 295-304 (1991); Haynes et al., J. Clin. Invest. 61: 703-797 (1978); Wahl, “Glucocorticoids and wound healing”, In: Antiinflammatory Steroid Action: Basic and Clinical Aspects, Academic Press, New York, pp. 280-302 (1989); Pierce et al., Proc. Natl. Acad. Sci. USA 86: 2229-2233 (1989)).

[1408] To demonstrate that a polypeptide of the invention can accelerate the healing process, the effects of multiple topical applications of the polypeptide on full thickness excisional skin wounds in rats in which healing has been impaired by the systemic administration of methylprednisolone is assessed.

[1409] Young adult male Sprague Dawley rats weighing 250-300 g (Charles River Laboratories) are used in this example. The animals are purchased at 8 weeks of age and are 9 weeks old at the beginning of the study. The healing response of rats is impaired by the systemic administration of methylprednisolone (17 mg/kg/rat intramuscularly) at the time of wounding. Animals are individually housed and received food and water ad libitum. All manipulations are performed using aseptic techniques. This study would be conducted according to the rules and guidelines of Bristol-Myers Squibb Corporations Guidelines for the Care and Use of Laboratory Animals.

[1410] The wounding protocol is followed according to section A, above. On the day of wounding, animals are anesthetized with an intramuscular injection of ketamine (50 mg/kg) and xylazine (5 mg/kg). The dorsal region of the animal is shaved and the skin washed with 70% ethanol and iodine solutions. The surgical area is dried with sterile gauze prior to wounding. An 8 mm full-thickness wound is created using a Keyes tissue punch. The wounds are left open for the duration of the experiment. Applications of the testing materials are given topically once a day for 7 consecutive days commencing on the day of wounding and subsequent to methylprednisolone administration. Prior to treatment, wounds are gently cleansed with sterile saline and gauze sponges.

[1411] Wounds are visually examined and photographed at a fixed distance at the day of wounding and at the end of treatment. Wound closure is determined by daily measurement on days 1-5 and on day 8. Wounds are measured horizontally and vertically using a calibrated Jameson caliper. Wounds are considered healed if granulation tissue is no longer visible and the wound is covered by a continuous epithelium.

[1412] The polypeptide of the invention is administered using at a range different doses, from 4 mg to 500 mg per wound per day for 8 days in vehicle. Vehicle control groups received 50 mL of vehicle solution.

[1413] Animals are euthanized on day 8 with an intraperitoneal injection of sodium pentobarbital (300 mg/kg). The wounds and surrounding skin are then harvested for histology. Tissue specimens are placed in 10% neutral buffered formalin in tissue cassettes between biopsy sponges for further processing.

[1414] Four groups of 10 animals each (5 with methylprednisolone and 5 without glucocorticoid) are evaluated: 1) Untreated group 2) Vehicle placebo control 3) treated groups.

[1415] Wound closure is analyzed by measuring the area in the vertical and horizontal axis and obtaining the total area of the wound. Closure is then estimated by establishing the differences between the initial wound area (day 0) and that of post treatment (day 8). The wound area on day 1 is 64 mm2, the corresponding size of the dermal punch. Calculations are made using the following formula:

[1416] [Open area on day 8]-[Open area on day 1]/[Open area on day 1]

[1417] Specimens are fixed in 10% buffered formalin and paraffin embedded blocks are sectioned perpendicular to the wound surface (5 mm) and cut using an Olympus microtome. Routine hematoxylin-eosin (H&E) staining is performed on cross-sections of bisected wounds. Histologic examination of the wounds allows assessment of whether the healing process and the morphologic appearance of the repaired skin is improved by treatment with a polypeptide of the invention. A calibrated lens micrometer is used by a blinded observer to determine the distance of the wound gap.

[1418] Experimental data are analyzed using an unpaired t test. A p value of <0.05 is considered significant.

[1419] One skilled in the art could easily modify the exemplified studies to test the activity of polynucleotides of the invention (e.g., gene therapy), agonists, and/or antagonists of polynucleotides or polypeptides of the invention.

### Example 45

### Lymphedema Animal Model

[1420] The purpose of this experimental approach is to create an appropriate and consistent lymphedema model for testing the therapeutic effects of a polypeptide of the invention in lymphangiogenesis and re-establishment of the lymphatic circulatory system in the rat hind limb. Effectiveness is measured by swelling volume of the affected limb, quantification of the amount of lymphatic vasculature, total blood plasma protein, and histopathology. Acute lymphedema is observed for 7-10 days. Perhaps more importantly, the chronic progress of the edema is followed for up to 3-4 weeks.

[1421] Prior to beginning surgery, blood sample is drawn for protein concentration analysis. Male rats weighing approximately ˜350 g are dosed with Pentobarbital. Subsequently, the right legs are shaved from knee to hip. The shaved area is swabbed with gauze soaked in 70% EtOH. Blood is drawn for serum total protein testing. Circumference and volumetric measurements are made prior to injecting dye into paws after marking 2 measurement levels (0.5 cm above heel, at mid-pt of dorsal paw). The intradermal dorsum of both right and left paws are injected with 0.05 ml of 1% Evan's Blue. Circumference and volumetric measurements are then made following injection of dye into paws.

[1422] Using the knee joint as a landmark, a mid-leg inguinal incision is made circumferentially allowing the femoral vessels to be located. Forceps and hemostats are used to dissect and separate the skin flaps. After locating the femoral vessels, the lymphatic vessel that runs along side and underneath the vessel(s) is located. The main lymphatic vessels in this area are then electrically coagulated suture ligated.

[1423] Using a microscope, muscles in back of the leg (near the semitendinosis and adductors) are bluntly dissected. The popliteal lymph node is then located. The 2 proximal and 2 distal lymphatic vessels and distal blood supply of the popliteal node are then and ligated by suturing. The popliteal lymph node, and any accompanying adipose tissue, is then removed by cutting connective tissues.

[1424] Care is taken to control any mild bleeding resulting from this procedure. After lymphatics are occluded, the skin flaps are sealed by using liquid skin (Vetbond) (A J Buck). The separated skin edges are sealed to the underlying muscle tissue while leaving a gap of 0.5 cm around the leg. Skin also may be anchored by suturing to underlying muscle when necessary.

[1425] To avoid infection, animals are housed individually with mesh (no bedding). Recovering animals are checked daily through the optimal edematous peak, which typically occurred by day 5-7. The plateau edematous peak are then observed. To evaluate the intensity of the lymphedema, the circumference and volumes of 2 designated places on each paw before operation and daily for 7 days are measured. The effect plasma proteins on lymphedema is determined and whether protein analysis is a useful testing perimeter is also investigated. The weights of both control and edematous limbs are evaluated at 2 places. Analysis is performed in a blind manner.

[1426] Circumference Measurements: Under brief gas anesthetic to prevent limb movement, a cloth tape is used to measure limb circumference. Measurements are done at the ankle bone and dorsal paw by 2 different people then those 2 readings are averaged. Readings are taken from both control and edematous limbs.

[1427] Volumetric Measurements: On the day of surgery, animals are anesthetized with Pentobarbital and are tested prior to surgery. For daily volumetrics animals are under brief halothane anesthetic (rapid immobilization and quick recovery), both legs are shaved and equally marked using waterproof marker on legs. Legs are first dipped in water, then dipped into instrument to each marked level then measured by Buxco edema software(Chen/Victor). Data is recorded by one person, while the other is dipping the limb to marked area.

[1428] Blood-plasma protein measurements: Blood is drawn, spun, and serum separated prior to surgery and then at conclusion for total protein and Ca2+ comparison.

[1429] Limb Weight Comparison: After drawing blood, the animal is prepared for tissue collection. The limbs are amputated using a quillitine, then both experimental and control legs are cut at the ligature and weighed. A second weighing is done as the tibio-cacaneal joint is disarticulated and the foot is weighed.

[1430] Histological Preparations: The transverse muscle located behind the knee (popliteal) area is dissected and arranged in a metal mold, filled with freezeGel, dipped into cold methylbutane, placed into labeled sample bags at −80EC until sectioning. Upon sectioning, the muscle is observed under fluorescent microscopy for lymphatics.

[1431] One skilled in the art could easily modify the exemplified studies to test the activity of polynucleotides of the invention (e.g., gene therapy), agonists, and/or antagonists of polynucleotides or polypeptides of the invention.

### Example 46

### Suppression Of TNF Alpha-Induced Adhesion Molecule Expression By A Polypeptide Of The Invention

[1432] The recruitment of lymphocytes to areas of inflammation and angiogenesis involves specific receptor-ligand interactions between cell surface adhesion molecules (CAMs) on lymphocytes and the vascular endothelium. The adhesion process, in both normal and pathological settings, follows a multi-step cascade that involves intercellular adhesion molecule-1(ICAM-1), vascular cell adhesion molecule-1 (VCAM-1), and endothelial leukocyte adhesion molecule-I (E-selectin) expression on endothelial cells (EC). The expression of these molecules and others on the vascular endothelium determines the efficiency with which leukocytes may adhere to the local vasculature and extravasate into the local tissue during the development of an inflammatory response. The local concentration of cytokines and growth factor participate in the modulation of the expression of these CAMs.

[1433] Tumor necrosis factor alpha (TNF-a), a potent proinflammatory cytokine, is a stimulator of all three CAMs on endothelial cells and may be involved in a wide variety of inflammatory responses, often resulting in a pathological outcome.

[1434] The potential of a polypeptide of the invention to mediate a suppression of TNF-a induced CAM expression can be examined. A modified ELISA assay which uses ECs as a solid phase absorbent is employed to measure the amount of CAM expression on TNF-a treated ECs when co-stimulated with a member of the FGF family of proteins.

[1435] To perform the experiment, human umbilical vein endothelial cell (HUVEC) cultures are obtained from pooled cord harvests and maintained in growth medium (EGM-2; Clonetics, San Diego, Calif.) supplemented with 10% FCS and 1% penicillin/streptomycin in a 37 degree C. humidified incubator containing 5% CO2. HUVECs are seeded in 96-well plates at concentrations of 1×104 cells/well in EGM medium at 37 degree C. for 18-24 hrs or until confluent. The monolayers are subsequently washed 3 times with a serum-free solution of RPMI-1640 supplemented with 100 U/ml penicillin and 100 mg/ml streptomycin, and treated with a given cytokine and/or growth factor(s) for 24 h at 37 degree C. Following incubation, the cells are then evaluated for CAM expression.

[1436] Human Umbilical Vein Endothelial cells (HUVECs) are grown in a standard 96 well plate to confluence. Growth medium is removed from the cells and replaced with 90 ul of 199 Medium (10% FBS). Samples for testing and positive or negative controls are added to the plate in triplicate (in 10 ul volumes). Plates are incubated at 37 degree C. for either 5 h (selectin and integrin expression) or 24 h (integrin expression only). Plates are aspirated to remove medium and 100 μl of 0.1% paraformaldehyde-PBS(with Ca++ and Mg++) is added to each well. Plates are held at 4° C. for 30 min.

[1437] Fixative is then removed from the wells and wells are washed 1X with PBS(+Ca,Mg)+0.5% BSA and drained. Do not allow the wells to dry. Add 10 μl of diluted primary antibody to the test and control wells. Anti-ICAM-1-Biotin, Anti-VCAM-1-Biotin and Anti-E-selectin-Biotin are used at a concentration of 10 μg/ml (1:10 dilution of 0.1 mg/ml stock antibody). Cells are incubated at 37° C. for 30 min. in a humidified environment. Wells are washed X3 with PBS(+Ca,Mg)+0.5% BSA.

[1438] Then add 20 μl of diluted ExtrAvidin-Alkaline Phosphatase (1:5,000 dilution) to each well and incubated at 37° C. for 30 min. Wells are washed X3 with PBS(+Ca,Mg)+0.5% BSA. 1 tablet of p-Nitrophenol Phosphate pNPP is dissolved in 5 ml of glycine buffer (pH 10.4). 100 μl of pNPP substrate in glycine buffer is added to each test well. Standard wells in triplicate are prepared from the working dilution of the ExtrAvidin-Alkaline Phosphatase in glycine buffer: 1:5,000 (100)>10-0.5>10-1>10-1.5. 5 μl of each dilution is added to triplicate wells and the resulting AP content in each well is 5.50 ng, 1.74 ng, 0.55 ng, 0.18 ng. 100 μl of pNNP reagent must then be added to each of the standard wells. The plate must be incubated at 37° C. for 4 h. A volume of 50 μl of 3M NaOH is added to all wells. The results are quantified on a plate reader at 405 nm. The background subtraction option is used on blank wells filled with glycine buffer only. The template is set up to indicate the concentration of AP-conjugate in each standard well [5.50 ng; 1.74 ng; 0.55 ng; 0.18 ng]. Results are indicated as amount of bound AP-conjugate in each sample.

[1439] From the foregoing, it is apparent that the invention includes a number of general uses tat can be expressed concisely as follows. The invention provides for the use of any of the ncletic acid segments described above in the diagnosis or monitoring of diseases, such as cancer, inflammation, heart disease, diseases of the cardiovascular system, and infection by microorganisms. The invention further provides for the use of any of the nucleic acid segments in the manufacture of a medicament for the treatment or prophylaxis of such diseases. The invention further provides for the use of any of the DNA segments as a pharmaceutical.

### Example 47

### Method Of Assessing The Effect On Low Flow Ischemia In An Isolated Perfused Rat Heart Model By A Polypeptide Of The Present Invention

[1440] Male Sprague-Dawley rats (350-450 grams) are fasted overnight and then anesthetized with sodium pentobarbital (30-40 mg/kg, ip). Following intubation by tracheotomy, the animals are ventilated with a rodent respirator (Model 683, Harvard Instruments, South Natick, Mass.) at a tidal volume of 4-5 ml delivered at 65-75 breaths/min and anticoagulated with sodium heparin (1000 IU/kg) administered via external jugular vein. A median thoracotomy may then be performed, the ribs are retracted, and the heart may then be exposed. The pericardium may be removed and the ascending aorta cleared of all connective tissue. A 2-0 silk suture may be placed around the base of the aorta in order to secure a perfusion cannula. The inferior vena cava may be then clamped and an incision may be made in the base of aorta. A custom steel cannula connected to a 3 way stopcock may be quickly inserted through the incision and then secured with the preplaced suture. Retrograde extracorporeal perfusion may be established with oxygenated (95% oxygen, 5% carbon dioxide, pH 7.4) Krebs-Henseleit solution comprised of (in mM) 1.25 calcium chloride, 112 sodium chloride, 25 sodium bicarbonate, 5 potassium chloride, 1 potassium biphosphate, 1.2 magnesium sulfate and 5.5 dextrose. The heart may be then transferred to a standard Langendorff perfusion apparatus [Doring et al., The isolated perfused warm-blooded heart according to Langendorff, 1@ st ed. March: Biomesstechnik-Verlag; 1988] where it may be perfused with oxygenated Krebs-Henseleit buffer warmed to 37 DEG C. and delivered at a constant perfusion pressure of 86 mm Hg. A water filed latex ballon may be fashioned from a latex finger cot (#55613-413, VWR Scientific, S. Plainfield, N.J.) and attached to a stainless steel cannula (model LL2, Hugo Sachs, March-Hugstetten, Germany) which may be then inserted into the left ventricle. The cannula may be attached to a pressure transducer (model P23, Gould Instruments, Valley View, Ohio) for the measurement of developed ventricular force. The heart may be then submerged in a water-jacketed (37 DEG C.) organ bath. Perfusate flow may be monitored with an extracorporeal electromagnetic flow probe (model MDL 1401, Skalar Instruments, Litchfield, Conn.). Hearts are allowed to beat at their intrinsic normal sinus rate. All data are continuously digitized at 250 Hz for subsequent analysis (Po-Neh-Mah Acquisition System, Gould Instruments, Valley View, Ohio). From the digitized data, steady state measurements for heart rate, perfusate flow and LV (left ventricular) developed pressure (LV systolic-LV end-diastolic pressure) are obtained during control, drug pretreatment, low flow and reperfusion. Hearts are prepared and assayed in quadruplicate.

[1441] Ventricular Performance

[1442] Periodic load independent indices of myocardial performance are obtained as the mean slope of the linear portion of triplicate Frank-Starling (FS) curves [Schlant, Normal physiology of the cardiovascular system. In: Hurst J W, ed. The Heart, 4@th ed. New York: McGraw-Hill; 1978: 71-100].

[1443] Similarly, the mean of the peak left ventricular developed pressures (LVDPmax) obtained during each discrete series of FS curves may be also recorded and meaned. FS curves are obtained by the inflation of the intraventricular balloon at a constant rate of 50 .mu.1/min with a programmable infusion/withdrawal pump (model 44, Harvard Apparatus, South Natick, Mass.). Balloon inflation may be discontinued at the onset of the descending limb of the FS curve, defined as that point where left ventricular developed pressure (LVDP) declined with further increases in balloon volume (preload). The balloon volume may be then removed at 300 .mu.1/min until LVDP may be undetectable (<2 mmHg). This process may be repeated until 3 reproducible curves are obtained.

[1444] Preparation And Administration of Vector

[1445] Polynucleotides encoding polypeptides of the present invention may be cloned into an appropriate vector (referred to as “test vector”) as described herein or otherwise known in the art and administered in a pharmaceutically effective amount via infusion into the distal perfusion stream of each heart with a programmable infusion pump (model 22, Harvard Apparatus, South Natick, Mass.). Each pump may be controlled by a custom computer program which continuously monitored the perfusate flow in each heart, and dynamically adjusted the infusion rate of a test vector to maintain a constant DMSO concentration of 0.04%. Vehicle hearts are treated in an identical manner without said polynucleotides. Vectors may represent plasmids, viral vectors, etc., any of which comprising the encoding polynucleotide sequence of a polypeptide of the present invention, or fragment thereof.

[1446] Experimental Protocol

[1447] Using this model, the vector comprising the encoding polynucleotide sequence of a polypeptide of the present invention, or fragment thereof may be compared to both vehicle and the selective angiotensin converting enzyme inhibitor fosinoprilat (free acid form of fosinopril). Test vector may be run in 20 hearts, vehicle in 21, and fosinoprilat in 19, for example.

[1448] The maximum dose of each vector/compound may be limited to the maximum no effect hemodynamic dose, assessed in normal hearts, in order to avoid the confounding effects of pharmacologically induced cardio-depression on ventricular performance.

[1449] Following a preliminary five minute equilibration period, control FS curves are performed in each heart and LVDPmax noted for each heart. Experimental preload (balloon volume) may be then adjusted to that unique balloon volume which produced 70% of LVDPmax in each heart. This volume may be then maintained as subsequently detailed. A five minute control period ensued once the specified preload had been achieved in all hearts. At this point infusion of either test vector, drug, or vehicle may commence and may be continued for the remainder of the experiment.

[1450] In order to avoid confounding inotropic drug effects, the dosage rationale for drug treatment during low flow ischemia may be to end with the highest concentration which did not affect steady state hemodynamics at normal perfusion pressure. Following a 5 minute control period, the drug may be administered as a continuous infusion for 10 minutes at normal perfusion (86 mmHg), and throughout 45 mintues of low flow ischemia (50 mmHg).

[1451] The slope of the Frank-Starling (FS) relationship may be employed as a load independent index of ventricular contractile function during control and low flow ischemia. All ES data are normalized and expressed as a percent of the control FS for each heart. Data for all like groups are pooled and are expressed as mean .+-.sem (standard error of the mean). All groups are compared by a one way analysis of variance. A p value of <0.05 may be considered significant.

[1452] Additional methods may be employed to determine the effect of the polynucleotides and polypeptides of the present invention on cardiovascular function, or to exemplify any function associated with said polynucleotides and polypeptides herein, such as for example, those methods described in U.S. Pat. Nos. 6,140,319; U.S. Pat. Nos. 6,248,729; International Publication No. WO0174348; International Publication No. WO0057883; and International Publication No. WO9965500.

[1453] One skilled in the art could easily modify the exemplified studies to test the activity of polynucleotides of the invention (e.g., gene therapy), agonists, and/or antagonists of polynucleotides or polypeptides of the invention.

### Example 48

### Method of Creating N- and C-terminal Deletion Mutants Corresponding to the Polypeptides of the Present Invention

[1454] As described elsewhere herein, the present invention encompasses the creation of N- and C-terminal deletion mutants, in addition to any combination of N- and C-terminal deletions thereof, corresponding to the polypeptides of the present invention. A number of methods are available to one skilled in the art for creating such mutants. Such methods may include a combination of PCR amplification and gene cloning methodology. Although one of skill in the art of molecular biology, through the use of the teachings provided or referenced herein, and/or otherwise known in the art as standard methods, could readily create each deletion mutant of the present invention, exemplary methods are described below.

[1455] Briefly, using the isolated cDNA clone encoding the full-length BDKRB1 (SNP ID: AE103s1) polypeptide sequence (as described in Example 5, 6, and 7, for example), appropriate primers of about 15-25 nucleotides derived from the desired 5′ and 3′ positions of SEQ ID NO:7 may be designed to PCR amplify, and subsequently clone, the intended N- and/or C-terminal deletion mutant. Such primers could comprise, for example, an inititation and stop codon for the 5′ and 3′ primer, respectively. Such primers may also comprise restriction sites to facilitate cloning of the deletion mutant post amplification. Moreover, the primers may comprise additional sequences, such as, for example, flag-tag sequences, kozac sequences, or other sequences discussed and/or referenced herein.

[1456] For example, in the case of the L36 to N353 N-terminal deletion mutant, the following primers could be used to amplify a cDNA fragment corresponding to this deletion mutant:

| | |
|---|---|
| 5′ Primer | (SEQ ID NO:1576) |

5′-GCAGCAGCGGCCGCCTGCACAGAGTGCTGCCGAC-3′

[symbol]

| | |
|---|---|
| 3′ Primer | (SEQ ID NO:1577) |

5′-GCAGCAGTCGACATTCCGCCAGAAAAGTTGGAAG-3′

[symbol]

[1457] For example, in the case of the M1 to K600 C-terminal deletion mutant, the following primers could be used to amplify a cDNA fragment corresponding to this deletion mutant:

| | |
|---|---|
| 5′ Primer | (SEQ ID NO:1578) |

5′-GCAGCAGCGGCCGCATGGCATCATCCTGGCCCCCTCTAG-3′

[symbol]

| | |
|---|---|
| 3′ Primer | (SEQ ID NO:1579) |

5′-GCAGCAGTCGACAAAGAAGTTGGCCAATTGCAGGCCC-3′

[symbol]

[1458] Representative PCR amplification conditions are provided below, although the skilled artisan would appreciate that other conditions may be required for efficient amplification. A 100 ul PCR reaction mixture may be prepared using 10 ng of the template DNA (cDNA clone of BDKRB1 (SNP ID: AE103s1)), 200 uM 4dNTPs, 1 uM primers, 0.25U Taq DNA polymerase (PE), and standard Taq DNA polymerase buffer. Typical PCR cycling condition are as follows:

| | | |
|---|---|---|
| 20-25 | cycles: | 45 sec, 93 degrees |
| | | 2 min, 50 degrees |
| | | 2 min, 72 degrees |
| 1 | cycle: | 10 min, 72 degrees |

[1459] After the final extension step of PCR, 5U Klenow Fragment may be added and incubated for 15 min at 30 degrees.

[1460] Upon digestion of the fragment with the NotI and SalI restriction enzymes, the fragment could be cloned into an appropriate expression and/or cloning vector which has been similarly digested (e.g., pSport1, among others). . The skilled artisan would appreciate that other plasmids could be equally substituted, and may be desirable in certain circumstances. The digested fragment and vector are then ligated using a DNA ligase, and then used to transform competent E. coli cells using methods provided herein and/or otherwise known in the art.

[1461] The 5′ primer sequence for amplifying any additional N-terminal deletion mutants may be determined by reference to the following formula:

[1462] (S+(X*3)) to ((S+(X*3))+25), wherein ‘S’ is equal to the nucleotide position of the initiating start codon of BDKRB1 (SNP ID: AE103s1) gene (SEQ ID NO:7), and ‘X’ is equal to the most N-terminal amino acid of the intended N-terminal deletion mutant. The first term will provide the start 5′ nucleotide position of the 5′ primer, while the second term will provide the end 3′ nucleotide position of the 5′ primer corresponding to sense strand of SEQ ID NO:7. Once the corresponding nucleotide positions of the primer are determined, the final nucleotide sequence may be created by the addition of applicable restriction site sequences to the 5′ end of the sequence, for example. As referenced herein, the addition of other sequences to the 5′ primer may be desired in certain circumstances (e.g., kozac sequences, etc.).

[1463] The 3′ primer sequence for amplifying any additional N-terminal deletion mutants may be determined by reference to the following formula:

[1464] (S+(X*3)) to ((S+(X*3))−25), wherein ‘S’ is equal to the nucleotide position of the initiating start codon of the BDKRB1 (SNP ID: AE103s1) gene (SEQ ID NO:7), and ‘X’ is equal to the most C-terminal amino acid of the intended N-terminal deletion mutant. The first term will provide the start 5′ nucleotide position of the 3′ primer, while the second term will provide the end 3′ nucleotide position of the 3′ primer corresponding to the anti-sense strand of SEQ ID NO:7. Once the corresponding nucleotide positions of the primer are determined, the final nucleotide sequence may be created by the addition of applicable restriction site sequences to the 5′ end of the sequence, for example. As referenced herein, the addition of other sequences to the 3′ primer may be desired in certain circumstances (e.g., stop codon sequences, etc.). The skilled artisan would appreciate that modifications of the above nucleotide positions may be necessary for optimizing PCR amplification.

[1465] The same general formulas provided above may be used in identifying the 5=′ and 3′ primer sequences for amplifying any C-terminal deletion mutant of the present invention. Moreover, the same general formulas provided above may be used in identifying the 5′ and 3′ primer sequences for amplifying any combination of N-terminal and C-terminal deletion mutant of the present invention. The skilled artisan would appreciate that modifications of the above nucleotide positions may be necessary for optimizing PCR amplification.

### Example 49

### Additional Methods of Genotyping the SNPs of the Present Invention

[1466] The skilled artisan would acknowledge that there are a number of methods that may be employed for genotyping a SNP of the present invention, aside from the preferred methods described herein. The present invention encompasses the following non-limiting types of genotype assays: PCR-free genotyping methods, Single-step homogeneous methods, Homogeneous detection with fluorescence polarization, Pyrosequencing, “Tag” based DNA chip system, Bead-based methods, fluorescent dye chemistry, Mass spectrometry based genotyping assays, TaqMan genotype assays, Invader genotype assays, and microfluidic genotype assays, among others.

[1467] Specifically encompassed by the present invention are the following, non-limiting genotyping methods: Landegren, U., Nilsson, M. & Kwok, P. Genome Res 8, 769-776 (1998); Kwok, P., Pharmacogenomics 1, 95-100 (2000); Gut, I., Hum Mutat 17, 475-492 (2001); Whitcombe, D., Newton, C. & Little, S., Curr Opin Biotechnol 9, 602-608 (1998); Tillib, S. & Mirzabekov, A., Curr Opin Biotechnol 12, 53-58 (2001); Winzeler, E. et al., Science 281, 1194-1197 (1998); Lyamichev, V. et al., Nat Biotechnol 17, 292-296 (1999); Hall, J. et al., Proc Natl Acad Sci U S A 97, 8272-8277 (2000); Mein, C. et al., Genome Res 10, 333-343 (2000); Ohnishi, Y. et al., J Hum Genet 46, 471-477 (2001); Nilsson, M. et al., Science 265, 2085-2088 (1994); Baner, J., Nilsson, M., Mendel-Hartvig, M. & Landegren, U., Nucleic Acids Res 26, 5073-5078 (1998); Baner, J. et al., Curr Opin Biotechnol 12, 11-15 (2001); Hatch, A., Sano, T., Misasi, J. & Smith, C., Genet Anal 15, 35-40 (1999); Lizardi, P. et al., Nat Genet 19, 225-232 (1998); Zhong, X., Lizardi, P., Huang, X., Bray-Ward, P. & Ward, D., Proc Natl Acad Sci U S A 98, 3940-3945 (2001); Faruqi, F. et al. BMC Genomics 2, 4 (2001); Livak, K., Gnet Anal 14, 143-149 (1999); Marras, S., Kramer, F. & Tyagi, S., Genet Anal 14, 151-156 (1999); Ranade, K. et al., Genome Res 11, 1262-1268 (2001); Myakishev, M., Khripin, Y., Hu, S. & Hamer, D., Genome Re 11, 163-169 (2001); Beaudet, L., Bedard, J., Breton, B., Mercuri, R. & Budarf, M., Genome Res 11, 600-608 (2001); Chen, X., Levine, L. & PY, K., Genome Res 9, 492-498 (1999); Gibson, N. et al., Clin Chem 43, 1336-1341 (1997); Latif, S., Bauer-Sardina, I., Ranade, K., Livak, K. & PY, K., Genome Res 11, 436-440 (2001); Hsu, T., Law, S., Duan, S., Neri, B. & Kwok, P., Clin Chem 47, 1373-1377 (2001); Alderborn, A., Kristofferson, A. & Hammerling, U., Genome Res 10, 1249-1258 (2000); Ronaghi, M., Uhlen, M. & Nyren, P., Science 281, 363, 365 (1998); Ronaghi, M., Genome Res 11, 3-11 (2001); Pease, A. et al., Proc Natl Acad Sci U S A 91, 5022-5026 (1994); Southern, E., Maskos, U. & Elder, J., Genomics 13, 1008-1017 (1993); Wang, D. et al., Science 280, 1077-1082 (1998); Brown, P. & Botstein, D., Nat Genet 21, 33-37 (1999); Cargill, M. et al. Nat Genet 22, 231-238 (1999); Dong, S. et al., Genome Res 11, 1418-1424 (2001); Halushka, M. et al., Nat Genet 22, 239-247 (1999); Hacia, J., Nat Genet 21, 42-47 (1999); Lipshutz, R., Fodor, S., Gingeras, T. & Lockhart, D., Nat Genet 21, 20-24 (1999); Sapolsky, R. et al., Genet Anal 14, 187-192 (1999); Tsuchihashi, Z. & Brown, P., J Virol 68, 5863 (1994); Herschlag, D., J Biol Chem 270, 20871-20874 (1995); Head, S. et al., Nucleic Acids Res 25, 5065-5071 (1997); Nikiforov, T. et al., Nucleic Acids Res 22, 4167-4175 (1994); Syvanen, A. et al., Genomics 12, 590-595 (1992); Shumaker, J., Metspalu, A. & Caskey, C., Hum Mutat 7, 346-354 (1996); Lindroos, K., Liljedahl, U., Raitio, M. & Syvanen, A., Nucleic Acids Res 29, E69-9 (2001); Lindblad-Toh, K. et al., Nat Genet 24, 381-386 (2000); Pastinen, T. et al., Genome Res 10, 1031-1042 (2000); Fan, J. et al., Genome Res 10, 853-860 (2000); Hirschhorn, J. et al., Proc Natl Acad Sci U S A 97, 12164-12169 (2000); Bouchie, A., Nat Biotechnol 19, 704 (2001); Hensel, M. et al., Science 269, 400-403 (1995); Shoemaker, D., Lashkari, D., Morris, D., Mittmann, M. & Davis, R. Nat Genet 14, 450-456 (1996); Gerry, N. et al., J Mol Biol 292, 251-262 (1999); Ladner, D. et al., Lab Invest 81, 1079-1086 (2001); lannone, M. et al., Cytometry 39, 131-140 (2000); Fulton, R., McDade, R., Smith, P., Kienker, L. & Kettman, J. J., Clin Chem 43, 1749-1756 (1997); Armstrong, B., Stewart, M. & Mazumder, A., Cytometry 40, 102-108 (2000); Cai, H. et al., Genomics 69, 395 (2000); Chen, J. et al., Genome Res 10, 549-557 (2000); Ye, F. et al. Hum Mutat 17, 305-316 (2001); Michael, K., Taylor, L., Schultz, S. & Walt, D., Anal Chem 70, 1242-1248 (1998); Steemers, F., Ferguson, J. & Walt, D., Nat Biotechnol 18, 91-94 (2000); Chan, W. & Nie, S., Science 281, 2016-2018 (1998); Han, M., Gao, X., Su, J. & Nie, S., Nat Biotechnol 19, 631-635 (2001); Griffin, T. & Smith, L., Trends Biotechnol 18, 77-84 (2000); Jackson, P., Scholl, P. & Groopman, J., Mol Med Today 6, 271-276 (2000); Haff, L. & Smirnov, I., Genome Res 7, 378-388 (1997); Ross, P., Hall, L., Smirnov, I. & Haff, L., Nat Biotechnol 16, 1347-1351 (1998); Bray, M., Boerwinkle, E. & Doris, P. Hum Mutat 17, 296-304 (2001); Sauer, S. et al., Nucleic Acids Res 28, E13 (2000); Sauer, S. et al., Nucleic Acids Res 28, E100 (2000); Sun, X., Ding, H., Hung, K. & Guo, B., Nucleic Acids Res 28, E68 (2000); Tang, K. et al., Proc Natl Acad Sci U S A 91, 10016-10020 (1999); Li, J. et al., Electrophoresis 20, 1258-1265 (1999); Little, D., Braun, A., O'Donnell, M. & Koster, H., Nat Med 3, 1413-1416 (1997); Little, D. et al. Anal Chem 69, 4540-4546 (1997); Griffin, T., Tang, W. & Smith, L., Nat Biotechnol 15, 1368-1372 (1997); Ross, P., Lee, K. & Belgrader, P., Anal Chem 69, 4197-4202 (1997); Jiang-Baucom, P., Girard, J., Butler, J. & Belgrader, P., Anal Chem 69, 4894-4898 (1997); Griffin, T., Hall, J., Prudent, J. & Smith, L., Proc Natl Acad Sci U S A 96, 6301-6306 (1999); Kokoris, M. et al., Mol Diagn 5, 329-340 (2000); Jurinke, C., van den Boom, D., Cantor, C. & Koster, H. (2001); and/or Taranenko, N. et al., Genet Anal 13, 87-94 (1996).

[1468] It will be clear that the invention may be practiced otherwise than as particularly described in the foregoing description and examples. Numerous modifications and variations of the present invention are possible in light of the above teachings and, therefore, are within the scope of the appended claims.

[1469] The entire disclosure of each document cited (including patents, patent applications, journal articles, abstracts, laboratory manuals, books, or other disclosures) in the Background of the Invention, Detailed Description, and Examples is hereby incorporated herein by reference. Further, the hard copy of the sequence listing submitted herewith and the corresponding computer readable form are both incorporated herein by reference in their entireties.

[1470] While this invention has been particularly shown and described with references to preferred embodiments thereof, it will be understood by those skilled in the art that various changes in form and details may be made therein without departing from the scope of the invention encompassed by the appended claims.

[1471] It will be clear that the invention may be practiced otherwise than as particularly described in the foregoing description and examples. Numerous modifications and variations of the present invention are possible in light of the above teachings and, therefore, are within the scope of the appended claims.

[1472] The entire disclosure of each document cited (including patents, patent applications, journal articles, abstracts, laboratory manuals, books, or other disclosures) in the Background of the Invention, Detailed Description, and Examples is hereby incorporated herein by reference. Further, the hard copy of the sequence listing submitted herewith and the corresponding computer readable form are both incorporated herein by reference in their entireties.

[1473] While this invention has been particularly shown and described with references to preferred embodiments thereof, it will be understood by those skilled in the art that various changes in form and details may be made therein without departing from the scope of the invention encompassed by the appended claims.

TABLE III

| Gene Name | Coriell DNA Panel(s) | Amplicon No. | Total SNPs | Missense | Silent | UTR | Intronic |
|---|---|---|---|---|---|---|---|
| Aminopeptidase P (XPNPEP2) | 24 + 47 (55AA) + 12 pt | 24 | 30 | 0 | 2 | 7 | 21 |
| Bradykinin B1 receptor (BDKRB1) | 24 + 95 (8AA, 103 CAU) + 12 pt | 7 | 14 | 2 | 5 | 3 | 4 |
| Bradykinin B2 receptor (BDKRB2) | 24 (8AA) + 12 pt | 12 | 36 | 3 | 2 | 14 | 17 |
| NK1 tachykinin receptor (TACR1) | 24 (8AA) + 12 pt | 7 | 9 | 0 | 3 | 3 | 3 |
| C1 esterase inhibitor (C1NH) | 24 (8AA) + 12 pt | 10 | 6 | 2 | 2 | 0 | 2 |
| Kallikrein 1 (KLK1) | 7 (7AA) + 12 pt | 5 | 6 | 1 | 1 | 2 | 2 |
| Protease Inhibitor 4 (PI4) | 7 (7AA) + 12 pt | 8 | 12 | 1 | 3 | 1 | 7 |
| Angiotensin Converting Enzyme 2 (ACE2) | 7 (7AA) + 12 pt | 20 | 9 | 0 | 0 | 0 | 9 |
| Totals: | | | 122 | 9 | 18 | 30 | 65 |

[1474] TABLE IV (1 OF 2)

| | | | | | | | FLANK_SEQ ALT |
|---|---|---|---|---|---|---|---|
| GENE_DESCRIPTION | HGNC_ID | SNP_ID | CONTIG_NUM | CONTIG_POS | FLANK_SEQ(REF/ALT) | FLANK_SEQ REQ(SEQ ID NO) | (SEQ ID NO) |
| Aminopeptidase P (membrane-bound) | XPNPEP2 | AE100sf | 1 | 127 | GCTGTCTCC [C/G] GAGCATGTG | 37 | 100 |
| Aminopeptidase P (membrane-bound) | XPNPEP2 | AE100s2 | 4 | 535 | AGAACAGTC [T/C] AGTGTTACA | 38 | 101 |
| Aminopeptidase P (membrane-bound) | XPNPEP2 | AE100s3 | 5 | 224 | CTCACCACC [C/T] TCCCCCAAG | 39 | 102 |
| Aminopeptidase P (membrane-bound) | XPNPEP2 | AE100s4 | 5 | 392 | AGGCCTCAG [T/C] CCAAGCTGA | 40 | 103 |
| Aminopeptidase P (membrane-bound) | XPNPEP2 | AE100s5 | 6 | 432 | CGGGCCCCA [G/A] CCCTCACTC | 41 | 104 |
| Aminopeptidase P (membrane-bound) | XPNPEP2 | AE100s6 | 7 | 268 | TAATAAAAG [A/G] GGGGTGGCC | 42 | 105 |
| Aminopeptidase P (membrane-bound) | XPNPEP2 | AE100s7 | 10 | 461 | AAAAGCAGC [G/A] AAACCCTTT | 43 | 106 |
| Aminopeptidase P (membrane-bound) | XPNPEP2 | AE100s8 | 13 | 273 | CACAGGGG [C/T] GTTTTCAGA | 44 | 107 |
| Aminopeptidase P (membrane-bound) | XPNPEP2 | AE100s9 | 13 | 324 | TTTGCCACC [A/G] TTTCGTGGC | 45 | 108 |
| Aminopeptidase P (membrane-bound) | XPNPEP2 | AE100s10 | 14 | 856 | AGCATGCAC [C/G] TGAGTCACC | 46 | 109 |
| Aminopeptidase P (membrane-bound) | XPNPEP2 | AE100s11 | 15 | 187 | AGGT [T/C] CTCCACCA | 47 | 110 |
| Aminopeptidase P (membrane-bound) | XPNPEP2 | AE100s12 | 15 | 194 | CCTCCA [C/T] CAAGGCC 48 | 111 | |
| Aminopeptidase P (membrane-bound) | XPNPEP2 | AE100s13 | 15 | 218 | GACCCAGT [G/A] CAGGTTAG | 49 | 112 |
| Aminopeptidase P (membrane-bound) | XPNPEP2 | AE100s14 | 8 | 221 | TTTCCCCGG [G/C] CTCTTCCTT | 50 | 113 |
| Aminopeptidase P (membrane-bound) | XPNPEP2 | AE100s15 | 8 | 243 | GCCTTTCCT [A/G] GGCTCGAGC | 51 | 114 |
| Aminopeptidase P (membrane-bound) | XPNPEP2 | AE100s16 | 14 | 139 | AATATTTAA [C/T] GCTGATCTG | 52 | 115 |
| Aminopeptidase P (membrane-bound) | XPNPEP2 | AE100s17 | 22 | 609 | GAAAGGA [A/C] GACAT | 53 | 116 |
| Aminopeptidase P (membrane-bound) | XPNPEP2 | AE100s18 | 22 | 964 | AGGATTGGC [T/G] CTGGCTTTT | 54 | 117 |
| Aminopeptidase P (membrane-bound) | XPNPEP2 | AE100s19 | 26 | 195 | TGGAGGA [C/T] GGGAGGAG | 55 | 118 |
| Aminopeptidase P (membrane-bound) | XPNPEP2 | AE100s20 | 27 | 306 | TGGCTT [A/G] GAGAGGCTG | 56 | 119 |
| Aminopeptidase P (membrane-bound) | XPNPEP2 | AE100s21 | 27 | 695 | GGTCCCAGG [A/C] CCCAGGAAC | 57 | 120 |
| Aminopeptidase P (membrane-bound) | XPNPEP2 | AE100s22 | 28 | 710 | TACCACACC [C/G] TGGGCCCC | 58 | 121 |
| Aminopeptidase P (membrane-bound) | XPNPEP2 | AE100s23 | 28 | 1369 | GCATTCCAG [C/T] TCTTTCACC | 59 | 122 |
| Bradykinin Receptor B1 | BDKRB1 | AE103s1 | 6 | 307 | TGTGGGCC [G/G] GCTCTTCA | 60 | 123 |
| Bradykinin Receptor B1 | BDKRB1 | AE103s2 | 4 | 273 | ATAAATGT [T/C] GGCAGCACT | 61 | 124 |
| Bradykinin Receptor B1 | BDKRB1 | AE103s3 | 7 | 958 | ACAAAGAAT [T/C] GATAAGAAA | 62 | 125 |
| Bradykinin Receptor B1 | BDKRB1 | AE103s4 | 1 | 196 | ACGGACTGA [G/A] ACCCTGTCT | 63 | 126 |
| Bradykinin Receptor B1 | BDKRB1 | AE103s5 | 7 | 240 | CAGTGGCCA [T/C] GCCTATAAT | 64 | 127 |
| Bradykinin Receptor B2 | BDKRB2 | AE104s1 | 10 | 86 | GGCTCCCCC [C/G] GCCGCGCCC | 65 | 128 |
| Bradykinin Receptor B2 | BDKRB2 | AE104s2 | 10 | 87 | GCGCCCCCC [A/G] CCGCGCCCA | 66 | 129 |
| Bradykinin Receptor B2 | BDKRB2 | AE104s3 | 10 | 462 | AGGTCATG [T/A] TCCCCCTCT | 67 | 130 |
| Bradykinin Receptor B2 | BDKRB2 | AE104s4 | 10 | 542 | GGGATGAGG [C/T] CTGGGGTGC | 68 | 131 |
| Bradykinin Receptor B2 | BDKRB2 | AE104s5 | 10 | 557 | GTGCTGCCT [G/A] TGGGGACAG | 69 | 132 |
| Bradykinin Receptor B2 | BDKRB2 | AE104s6 | 10 | 717 | AGGAC [A/G] CAGCACAGT | 70 | 133 |
| Bradykinin Receptor B2 | BDKRB2 | AE104s7 | 7 | 406 | GTCCCACAA [C/G] CCCCCTGCT | 71 | 134 |
| Bradykinin Receptor B2 | BDKRB2 | AE104s8 | 5 | 276 | GCACAACCA [T/C] CTGTCCCTG | 72 | 135 |
| Bradykinin Receptor B2 | BDKRB2 | AE104s9 | 5 | 390 | TGAGGCATC [A/T] TTACGCAG | 73 | 136 |
| Bradykinin Receptor B2 | BDKRB2 | AE104s10 | 6 | 527 | AGGTGCTCA [C/T] GTGGGGTGC | 74 | 137 |
| Bradykinin Receptor B2 | BDKRB2 | AE104s11 | 6 | 679 | TGAGTCTT [T/G] CACAGGACA | 75 | 138 |
| Bradykinin Receptor B2 | BDKRB2 | AE104s12 | 6 | 685 | CTTTCACAG [G/G] ACAGATGT | 76 | 139 |
| Bradykinin Receptor B2 | BDKRB2 | AE104s13 | 6 | 727 | AGACCATCA [T/C] GTGCTCTGG | 77 | 140 |
| Bradykinin Receptor B2 | BDKRB2 | AE104s14 | 8 | 482 | ACCATTG [T/C] CATTCCT | 78 | 141 |
| Bradykinin Receptor B2 | BDKRB2 | AE104s16 | 9 | 1010 | TAAACAAAA [T/C] TTGCCTAG | 79 | 142 |
| Bradykinin Receptor B2 | BDKRB2 | AE104s17 | 9 | 1072 | CCATGCCAG [A/G] AACCTGGGG | 80 | 143 |
| Tachyidnin Receptor 1 | TACR1 | AE106s1 | 1 | 614 | CACCTTCTT [T/C] CCCATCGCC | 81 | 144 |
| Tachyidnin Receptor 1 | TACR1 | AE106s2 | 2 | 789 | CAGGACCCA [T/G] ATGACACAG | 82 | 145 |
| Tachyidnin Receptor 1 | TACR1 | AE106s3 | 4 | 676 | TTCTGCCTG [T/G] CCCCTGCT | 83 | 146 |
| Tachyidnin Receptor 1 | TACR1 | AE106s4 | 6 | 152 | GAATGGGCT [T/C] TTGGGGAAAA | 84 | 147 |
| Tachyidnin Receptor 1 | TACR1 | AE106s5 | 6 | 220 | TTTGAGTCA [C/A] ACAGCATGA | 85 | 148 |
| Tachyidnin Receptor 1 | TACR1 | AE106s6 | 6 | 317 | TGCAAGTCC [T/C] AGTGTGAGG | 86 | 149 |
| Tachyidnin Receptor 1 | TACR1 | AE106s7 | 6 | 611 | GTCCAGGGA [C/T] GAGGGTGTG | 87 | 150 |
| C1 Esterase Inhibitor | C1NH | AE105s1 | 3 | 319 | AAAGGACA [G/A] AGGGAAT | 88 | 151 |
| C1 Esterase Inhibitor | C1NH | AE105s2 | 6 | 156 | ACTGTTAAG [G/A] TGCATCTCT | 89 | 152 |
| C1 Esterase Inhibitor | C1NH | AE105s3 | 6 | 366 | CGACCAG [C/T] CAGGATATG | 90 | 153 |
| C1 Esterase Inhibitor | C1NH | AE105s4 | 7 | 586 | TGCTATTCG [T/C] TGAACCCAT | 91 | 154 |
| C1 Esterase Inhibitor | C1NH | AE105s5 | 7 | 897 | CCTTCTCAG [C/G] AATGAAGAA | 92 | 155 |
| C1 Esterase Inhibitor | C1NH | AE105s6 | 8 | 276 | TTCCTCTTC [A/G] TGCTCTGGG | 93 | 156 |
| Kallikrein 1 (renal/pancreas/salivary) | KLK1 | AE107s1 | 1 | 153 | GGGCTTTTT [C/T] GCACTCATC | 94 | 157 |
| Kallikrein 1 (renal/pancreas/salivary) | KLK1 | AE107s2 | 1 | 299 | CCCCATCCC [C/T] GCCTTGGGC | 95 | 158 |
| Kallikrein 1 (renal/pancreas/salivary) | KLK1 | AE107s3 | 2 | 606 | TTGCCCACC [G/C] AGGAACCCG | 96 | 159 |
| Kallikrein 1 (renal/pancreas/salivary) | KLK1 | AE107s4 | 2 | 717 | GGACTCCTG [C/T] GTCCAAGGG | 97 | 160 |
| Kallikrein 1 (renal/pancreas/salivary) | KLK1 | AE107s5 | 4 | 632 | GGCATGAGA [C/T] TGACACAGC | 98 | 161 |
| Kallikrein 1 (renal/pancreas/salivary) | KLK1 | AE107s6 | 4 | 697 | TGGAAAGAT [G/A] GGTGATGGC | 99 | 162 |
| Bradykinin Receptor B1 | BDKRB1 | AE103s6 | 1 | 67 | TGTCATCAA [T/C] GGGGTCAT | 579 | 611 |
| Bradykinin Receptor B1 | BDKRB1 | AE103s7 | 1 | 151 | CGGCGGAG [G/A] CAGGCCCGG | 580 | 612 |
| Bradykinin Receptor B1 | BDKRB1 | AE103s8 | 1 | 296 | GCCTGCATC [C/G] TGCTCCTC | 581 | 613 |
| Bradykinin Receptor B1 | BDKRB1 | AE103s9 | 2 | 136 | ACGCGGGA [G/A] GAGGTCAGA | 582 | 614 |
| Bradykinin Receptor B2 | BDKRB2 | AE104s18 | 7 | 202 | TGGAGAATG [C/A] GTGTATTT | 583 | 615 |
| Bradykinin Receptor B2 | BDKRB2 | AE104s19 | 7 | 339 | TGTCTGTT [C/T] GTGAGGACT | 584 | 616 |
| Bradykinin Receptor B2 | BDKRB2 | AE104s20 | 2 | 271 | CCTTCCTTC [C/A] GAAGAGAAC | 585 | 617 |
| Bradykinin Receptor B2 | BDKRB2 | AE104s21 | 3 | 406 | AAACACCCG [C/T] ACCCAGGAA | 586 | 618 |
| Bradykinin Receptor B2 | BDKRB2 | AE104s22 | 3 | 463 | GTACGTGGC [G/A] TACAAAGAA | 587 | 619 |
| Bradykinin Receptor B2 | BDKRB2 | AE104s23 | 3 | 686 | ATGACATCA [T/C] TACCCAGCC | 588 | 620 |
| Bradykinin Receptor B2 | BDKRB2 | AE104s24 | 4 | 918 | CATCATCGA [T/C] GTAATCACA | 589 | 621 |
| Bradykinin Receptor B2 | BDKRB2 | AE104s25 | 4 | 1046 | GCCAGAAAG [G/A] GGGCTGCAG | 590 | 622 |
| Bradykinin Receptor B2 | BDKRB2 | AE104s26 | 4 | 1643 | CAGGAGAAC [T/C] GCCATCCAG | 591 | 623 |
| Bradykinin Receptor B2 | BDKRB2 | AE104s27 | 4 | 1826 | AAGTGGGAA [C/T] GACTGGGCA | 592 | 624 |
| Bradykinin Receptor B2 | BDKRB2 | AE104s28 | 4 | 2102 | TGAGGCATC [A/T] TTACGCAGA | 593 | 625 |
| Bradykinin Receptor B2 | BDKRB2 | AE104s29 | 4 | 2239 | AGGTGCTCA [T/C] TGGCTCCCT | 594 | 626 |
| Anglotensin Converting Enzyme 2 | ACE2 | AE109s1 | 7 | 55 | TGAAAGAA [C/A] CACATGGCC | 595 | 627 |
| Anglotensin Converting Enzyme 2 | ACE2 | AE109s2 | 10 | 37 | ATCATAGAT [A/G] TAAATATAT | 596 | 628 |
| Anglotensin Converting Enzyme 2 | ACE2 | AE109s3 | 10 | 290 | AGTTGACAA [C/G] TTTCACACC | 597 | 629 |
| Anglotensin Converting Enzyme 2 | ACE2 | AE109s4 | 11 | 282 | ATTAGTAGC [C/T] TACCTGGT | 598 | 630 |
| Anglotensin Converting Enzyme 2 | ACE2 | AE109s5 | 11 | 440 | GAATGCTAA [T/C] ATAAAGATA | 599 | 631 |
| Anglotensin Converting Enzyme 2 | ACE2 | AE109s6 | 15 | 109 | AGAATAATG [C/T] TTGGCACAC | 600 | 632 |
| Anglotensin Converting Enzyme 2 | ACE2 | AE109s7 | 15 | 241 | ATCAGACAG [A/G] TTTTTAGGT | 601 | 633 |
| Protease Inhibitor 4 | PI4 | AE110s1 | 2 | 447 | GCCTGCAGA [T/G] GTCCTGTAC | 602 | 634 |
| Protease Inhibitor 4 | PI4 | AE110s2 | 2 | 526 | CAAAGACTT [C/T] TATGTTGAT | 603 | 635 |
| Protease Inhibitor 4 | PI4 | AE110s3 | 3 | 188 | GAGTTAGA [A/G] CATTAG | 604 | 636 |
| Protease Inhibitor 4 | PI4 | AE110s4 | 3 | 269 | CCCACAAAC [T/A] GCTTCGG | 605 | 637 |
| Protease Inhibitor 4 | PI4 | AE110s5 | 4 | 563 | CTTGAGCTC [A/G] CTGACCAAATC | 606 | 638 |
| Protease Inhibitor 4 | PI4 | AE110s6 | 4 | 1528 | GAGGATGGC [T/A] ATCCTCAGA | 607 | 639 |
| Protease Inhibitor 4 | PI4 | AE110s7 | 4 | 1665 | TCCACAAC [A/C] TCTGTGGAG | 608 | 640 |
| Protease Inhibitor 4 | PI4 | AE110s8 | 4 | 1816 | CCAAAGTTG [T/C] GGGGATAG | 609 | 641 |
| Protease Inhibitor 4 | PI4 | AE110s9 | 4 | 2020 | TGTTTGTTT [G/C] GTTGTTTGT | 610 | 642 |
| Aminopeptidase P (membrane-bound) | XPNPEP2 | AE100s24 | 6 | 383 | GAGCCGGGT [A/G]AGGTCTGGT | 858 | 884 |
| Aminopeptidase P (membrane-bound) | XPNPEP2 | AE100s25 | 13 | 63 | GCTAGGGGC [T/C]TCGGACCTT | 859 | 885 |
| Aminopeptidase P (membrane-bound) | XPNPEP2 | AE100s26 | 13 | 161 | AACAGGATG [T/C]CCCAACAGG | 860 | 886 |
| Aminopeptidase P (membrane-bound) | XPNPEP2 | AE100s27 | 18 | 112 | TCCAGGAAC [T/C]GAGTGCCAA | 861 | 887 |
| Aminopeptidase P (membrane-bound) | XPNPEP2 | AE100s28 | 21 | 261 | CATGGTCCC [A/G]GGAGAGCCC | 862 | 888 |
| Aminopeptidase P (membrane-bound) | XPNPEP2 | AE100s29 | 21 | 293 | CCTGTTGGG [C/T]ATAGCCA | 863 | 889 |
| Aminopeptidase P (membrane-bound) | XPNPEP2 | AE100s30 | 22 | 144 | CCCTCCAGC [A/G]GGAATCTCG | 864 | 890 |
| Bradykinin Receptor B1 | BDKRB1 | AE103s10 | 7 | 766 | ACAAGGTGC [A/G]GGGGCCGCA | 865 | 891 |
| Bradykinin Receptor B1 | BDKRB1 | AE103s11 | 7 | 1292 | GTGGGCCCT [G/A]TATAATCAC | 866 | 892 |
| Bradykinin Receptor B1 | BDKRB1 | AE103s12 | 7 | 1808 | CTCAAGGGC [T/G]CAAGTGATC | 867 | 893 |
| Bradykinin Receptor B1 | BDKRB1 | AE103s13 | 7 | 1946 | ACAAGTATC [A/G]GGTAATGGC | 868 | 894 |
| Bradykinin Receptor B1 | BDKRB1 | AE103s14 | 7 | 1964 | CCTCTCTTA [T/C]TACACTTCC | 869 | 895 |
| Bradykinin Receptor B2 | BDKRB2 | AE103s30 | 2 | 106 | GTTGTGAGG [G/A]TTAAAGGCA | 870 | 896 |
| Bradykinin Receptor B2 | BDKRB2 | AE103s31 | 3 | 93 | GGCACGGAG [T/G]CCTCACGAA | 871 | 897 |
| Bradykinin Receptor B2 | BDKRB2 | AE103s32 | 3 | 402 | AACTGACCT [G/A]AGTACAGTG | 872 | 898 |
| Bradykinin Receptor B2 | BDKRB2 | AE103s33 | 3 | 404 | CTGACCTGA [G/A]TACAGTGAA | 873 | 899 |
| Bradykinin Receptor B2 | BDKRB2 | AE103s34 | 6 | 348 | TCTGCTCCA [T/C]GGAGCTATT | 874 | 900 |
| Bradykinin Receptor B2 | BDKRB2 | AE103s35 | 6 | 364 | ATTTCTAGA [C/A]CTCAGTGTC | 875 | 901 |
| Bradykinin Receptor B2 | BDKRB2 | AE103s36 | 6 | 619 | GACCGTCTC [G/A]TCGAACAGC | 876 | 902 |
| Protease Inhibitor 4 | PI4 | AE110s10 | 2 | 397 | GAAGCT [G/C]GTGGCT | 877 | 903 |
| Protease Inhibitor 4 | PI4 | AE110s11 | 4 | 304 | CACGC [A/G]TGTTTCC | 878 | 904 |
| Protease Inhibitor 4 | PI4 | AE110s12 | 4 | 1392 | GGTACCC [G/A]TTTGATAA | 879 | 905 |
| Tachyidnin Receptor 1 | TACR1 | AE106s8 | 2 | 92 | ATGTAGA [A/G]GTCTTGTGG | 880 | 906 |
| Tachyidnin Receptor 1 | TACR1 | AE106s9 | 3 | 405 | CCAGA [T/G]GCAGCTAG | 881 | 907 |
| Anglotensin Converting Enzyme 2 | ACE2 | AE109s8 | 12 | 359 | CTTGTGA [C/A]ACAGCT | 882 | 908 |
| Anglotensin Converting Enzyme 2 | ACE2 | AE109s9 | 20 | 123 | AAGTACA [T/C]GAAGAATT | 883 | 909 |

| REF_SEQ_NO | REF_SEQ_POS | REF_NT | ALT_NT | EXON | MUTATION_TYPE | REVCOMP | REF_CODON | ALT_CODON | CDNA_SEQ_ID | CDNA_SEQ_POS |
|---|---|---|---|---|---|---|---|---|---|---|
| AL023653.f | 82696 | C | G | Exon20 | Silent | 0 | CCC | CCG | U90724.1 | 2065 |
| AL023653.1 | 60160 | C | T | Intron3 | Non-CDS | 0 | | | | |
| AL023653.1 | 74483 | T | C | Intron15 | Non-CDS | 0 | | | | |
| AL023653.1 | 74651 | C | T | Intron15 | Non-CDS | 0 | | | | |
| AL023653.1 | 54549 | T | C | Intron1 | Non-CDS | 0 | | | | |
| AL023653.1 | 78521 | C | T | Intron7 | Non-CDS | 0 | | | | |
| AL023653.1 | 65566 | C | T | Intron7 | Non-CDS | 0 | | | | |
| AL023653.1 | 68286 | A | G | Intron10 | Non-CDS | 0 | | | | |
| AL023653.1 | 68236 | T | C | Intron10 | Non-CDS | 0 | | | | |
| AL023653.1 | 63088 | C | G | Intron7 | Non-CDS | 0 | | | | |
| AL023653.1 | 71620 | C | T | Intron13 | Non-CDS | 0 | | | | |
| AL023653.1 | 71627 | C | T | Intron13 | Non-CDS | 0 | | | | |
| AL023653.1 | 71851 | G | A | Intron13 | Non-CDS | 0 | | | | |
| AL023653.1 | 54356 | G | C | Exon1 | Non-CDS | 0 | | | | |
| AL023653.1 | 54334 | C | T | Exon1 | Non-CDS | 0 | | | | |
| AL023653.1 | 66924 | A | G | Intron6 | Non-CDS | 0 | | | | |
| AL023653.1 | 77206 | T | G | Intron17 | Non-CDS | 0 | | | | |
| AL023653.1 | 77052 | A | C | Intron17 | Non-CDS | 0 | | | | |
| AL023653.1 | 75689 | G | A | Intron16 | Non-CDS | 0 | | | | |
| AL023653.1 | 83469 | A | G | Intron20 | Non-CDS | 0 | | | | |
| AL023653.1 | 83658 | C | A | Exon21 | Non-CDS | 0 | | | | |
| AL023653.1 | 63926 | C | G | Exon21 | Non-CDS | 0 | | | | |
| AL023653.1 | 84585 | C | T | Exon21 | Non-CDS | 0 | | | | |
| U48231.1 | 2207 | G | A | Exon2 | Missense | 0 | CGG | CAG | NM_000710.1 | 956 |
| U48231.1 | 1380 | G | A | Exon2 | Silent | 0 | CCG | CCA | NM_000710.1 | 129 |
| U48231.1 | 2355 | A | G | Exon3 | Non-CDS | 0 | | | | |
| U48231.1 | 230 | C | T | Exon1 | Non-CDS | 0 | | | | |
| U48231.1 | 3072 | G | A | Exon3 | Non-CDS | 0 | | | | |
| AL355102.2 | 96425 | C | G | Intron1 | Non-CDS | 1 | | | | |
| AL355102.2 | 98427 | A | G | Intron1 | Non-CDS | 1 | | | | |
| AL355102.2 | 98802 | T | A | Intron1 | Non-CDS | 1 | | | | |
| AL355102.2 | 98882 | C | T | Intron1 | Non-CDS | 1 | | | | |
| AL355102.2 | 98897 | G | A | Intron1 | Non-CDS | 1 | | | | |
| AL355102.2 | 99056 | G | A | Intron1 | Non-CDS | 1 | | | | |
| AL355102.2 | 56369 | G | C | Intron2 | Non-CDS | 1 | | | | |
| AL355102.2 | 62653 | A | G | Exon3 | Non-CDS | 1 | | | NM_000623.1 | |
| AL355102.2 | 62738 | T | A | Exon3 | Non-CDS | 1 | | | NM_000623.1 | |
| AL355102.2 | 62601 | G | G | Exon3 | Non-CDS | 1 | | | NM_000623.1 | |
| AL355102.2 | 61132 | T | G | Exon3 | Non-CDS | 1 | | | NM_000623.1 | |
| AL355102.2 | 61136 | G | T | Exon3 | Non-CDS | 1 | | | NM_000623.1 | |
| AL355102.2 | 61280 | C | T | Exon3 | Non-CDS | 1 | | | NM_000623.1 | |
| AL355102.2 | 62290 | C | T | Exon3 | Non-CDS | 1 | | | NM_000623.1 | |
| AL355102.2 | 60403 | G | A | 3′Flank | Non-CDS | 1 | | | | |
| AL355102.2 | 60341 | C | T | 3′Flank | Non-CDS | 1 | | | | |
| AC007400.3 | 103665 | A | G | Exon1 | Silent | 1 | TTT | TTC | NM_001058.2 | 643 |
| AC007400.3 | 25769 | G | T | Exon2 | Silent | 1 | ATC | ATA | NM_001056.2 | 672 |
| AC007400.3 | 143458 | T | G | Intron3 | Non-CDS | 1 | | | | |
| AC007400.3 | 139028 | T | C | Exon5 | Non-CDS | 1 | | | | |
| AC007400.3 | 139096 | C | A | Exon5 | Non-CDS | 1 | | | NM_001058.2 | 1635 |
| AC007400.3 | 139193 | C | T | Exon5 | Non-CDS | 1 | | | NM_001058.2 | 1538 |
| AC007400.3 | 139367 | C | T | Exon5 | Silent | 1 | TCG | TCA | NM_001056.2 | 1344 |
| X54486.1 | 6766 | G | A | Intron4 | Non-CDS | 0 | | | | |
| X54486.1 | 15193 | A | G | Intron6 | Non-CDS | 0 | | | | |
| X54486.1 | 15401 | C | T | Exon7 | Silent | 0 | AGC | AGT | NM_000062.1 | 1278 |
| X54486.1 | 3493 | T | C | Exon3 | Missense | 0 | GTT | GCT | NM_000052.1 | 227 |
| X54486.1 | 3802 | C | G | Exon3 | Missense | 0 | GCA | GGA | NM_000052.1 | 636 |
| X54486.1 | 18012 | G | A | Exon5 | Missense | 0 | GTG | GCT | NM_000052.1 | 1498 |
| AF277050.1 | 4773 | A | G | Exon4 | Missense | 0 | AAA | GAA | NM_000052.1 | 592 |
| AF277050.1 | 4627 | G | A | Intron3 | Non-CDS | 0 | | | | |
| AF277050.1 | 4565 | G | C | Exon3 | Missense | 0 | GAG | CAG | NM_002257.1 | 469 |
| AF277050.1 | 4644 | C | T | Intron3 | Non-CDS | 0 | | | | |
| AF277050.1 | 5693 | A | G | 3′Flank | Non-CDS | 0 | | | | |
| AF277050.1 | 5628 | T | C | 3′Flank | Non-CDS | 0 | | | | |
| U48231.1 | 1599 | C | T | Exon3 | Silent | 0 | AAC | AAT | NM_090710.1 | 348 |
| U48231.1 | 1713 | G | A | Exon3 | Silent | 0 | AGG | AGA | NM_000710.1 | 462 |
| U48231.1 | 1826 | C | G | Exon3 | Missense | 0 | CTG | GTG | NM_000710.1 | 577 |
| U48231.1 | 1956 | G | A | Exon3 | Silent | 0 | GAG | GAA | NM_000710.1 | 705 |
| AL355102.2 | 58174 | G | T | Intron1 | Non-CDS | 1 | | | | |
| AL355102.2 | 68037 | G | A | Exon2 | Missense | 1 | CGT | TGT | NM_000623.1 | 40 |
| AL355102.2 | 101076 | A | C | 5′Flank | Non-CDS | 1 | | | | |
| AL355102.2 | 100859 | A | G | 5′Flank | Non-CDS | 1 | | | | |
| AL355102.2 | 100804 | T | C | 5′Flank | Non-CDS | 1 | | | | |
| AL355102.2 | 100381 | G | A | 5′Flank | Non-CDS | 1 | | | | |
| AL355102.2 | 63922 | A | G | Exon3 | Silent | 1 | GAT | GAC | NM_000623.1 | 933 |
| AL355102.2 | 69794 | C | T | Exon3 | Missense | 1 | GGG | GAG | NM_000623.1 | 1061 |
| AL355102.2 | 63297 | A | G | Exon3 | Non-CDS | 1 | | | NM_000623.1 | 1666 |
| AL355102.2 | 62978 | G | A | Exon3 | Non-CDS | 1 | | | NM_000623.1 | 1877 |
| AL355102.2 | 62738 | T | A | Exon3 | Non-CDS | 1 | | | NM_000623.1 | 2117 |
| AL355102.2 | 62601 | A | G | Exon3 | Non-CDS | 1 | | | NM_000623.1 | 2254 |
| AC003669.1 | 88127 | C | A | Intron14 | Non-CDS | 1 | | | | |
| AC003669.1 | 89795 | C | T | Intron12 | Non-CDS | 1 | | | | |
| AC003669.1 | 89542 | C | G | Intron13 | Non-CDS | 1 | | | | |
| AC003669.1 | 90164 | C | T | Intron3 | Non-CDS | 1 | | | | |
| AC003669.1 | 90322 | T | C | Intron2 | Non-CDS | 1 | | | | |
| AC003669.1 | 64113 | C | T | Intron16 | Non-CDS | 1 | | | | |
| AC003669.1 | 64245 | A | G | Exon16 | Silent | 1 | AAT | AAC | AF241254.1 | 2173 |
| L26101.1 | 6653 | T | G | Intron1 | Non-CDS | 0 | | | | |
| L26101.1 | 6734 | C | T | Exon2 | Silent | 0 | TTC | TTT | NM_006215.1 | 699 |
| L26101.1 | 7821 | T | C | Intron2 | Non-CDS | 0 | | | | |
| L26101.1 | 7720 | T | A | Intron2 | Non-CDS | 0 | | | | |
| L26101.1 | 3797 | T | C | Exon1 | Silent | 0 | AGT | AGC | NM_006215.1 | 697 |
| L26101.1 | 2732 | A | T | 5′Flank | Non-CDS | 0 | | | | |
| L26101.1 | 2695 | T | G | 5′Flank | Non-CDS | 0 | | | | |
| L26101.1 | 2544 | A | G | 5′Flank | Non-CDS | 0 | | | | |
| L26101.1 | 2340 | C | G | 5′Flank | Non-CDS | 0 | | | | |
| AL023653.1 | 69644 | C | T | Intron11 | Non-CDS | 0 | | | | |
| AL023653.1 | 70695 | G | A | Intron13 | Non-CDS | 0 | | | | |
| AL023653.1 | 70620 | G | A | Intron13 | Non-CDS | 0 | | | | |
| AL023653.1 | 65621 | C | T | Intron7 | Non-CDS | 0 | | | | |
| AL023653.1 | 84097 | G | A | Exon21 | Non-CDS | 0 | | | U90724.1 | 2689 |
| AL023653.1 | 84129 | C | T | Exon21 | Non-CDS | 0 | | | U90724.1 | 2601 |
| AL023653.1 | 61848 | T | C | Exon6 | Silent | 0 | CCT | CCC | U90724.1 | 711 |
| U48231.1 | 1979 | G | A | Exon3 | Missense | 0 | CGG | CAG | NM_000710.1 | 725 |
| U48231.1 | 2504 | A | G | Exon3 | Non-CDS | 0 | | | | |
| U48231.1 | 3025 | T | G | Exon3 | Non-CDS | 0 | | | | |
| U48231.1 | 3163 | G | A | Exon3 | Non-CDS | 0 | | | | |
| U48231.1 | 3181 | T | C | Exon3 | Non-CDS | 0 | | | | |
| AL355102.2 | 62804 | C | T | Exon3 | Non-CDS | 0 | | | NM_000623.1 | 2051 |
| AL355102.2 | 68030 | T | G | Exon3 | Missense | 1 | GAC | GCC | NM_000623.1 | 47 |
| AL355102.2 | 68339 | G | A | Intron1 | Non-CDS | 1 | | | | |
| AL355102.2 | 65341 | G | A | Intron1 | Non-CDS | 1 | | | | |
| AL355102.2 | 62672 | C | T | Exon3 | Non-CDS | 1 | | | NM_000623.1 | 2183 |
| AL355102.2 | 62655 | C | A | Exon3 | Non-CDS | 1 | | | NM_000623.1 | 2167 |
| AL355102.2 | 62943 | G | A | Exon3 | Non-CDS | 1 | | | NM_000623.1 | 1912 |
| L28101.1 | 9169 | C | G | Exon4 | Silent | 0 | ACC | AGC | NM_006216.1 | 1143 |
| L28101.1 | 3612 | C | T | Exon1 | Missense | 0 | CGC | TGC | NM_006216.1 | 412 |
| L28101.1 | 2624 | C | T | 5′Flank | Non-CDS | 0 | | | | |
| AC007400.3 | 141073 | G | A | Intron4 | Non-CDS | 1 | | | | |
| AC007400.3 | 143385 | C | A | Intron3 | Non-CDS | 1 | | | | |
| AC003659.1 | 69475 | G | T | Intron13 | Non-CDS | 1 | | | | |
| AC003659.1 | 85666 | C | T | Intron6 | Non-CDS | 1 | | | | |

[1475]

| GENE DESCRIPTION | HGNC ID | SNP ID | CONTIG_NUM | CONTIG_POS | REFSEQ_FLANK_ORIENT | REFSEQ_FLANK |
|---|---|---|---|---|---|---|
| Aminopeptidase P (membrane-bound) | XPNPEP2 | AE100s1 | 1 | 127 | 0 | GATGTCAGCCTGCTGTCTCC[C/G]GAGCATGTGAGTGCCCCTCA |
| Aminopeptidase P (membrane-bound) | XPNPEP2 | AE100s2 | 4 | 635 | N/A | GTCTCCTTTGCAGAACAGTC[C/T]AGTGTTACACTGAGTCCAGT |
| Aminopeptidase P (membrane-bound) | XPNPEP2 | AE100s3 | 5 | 224 | N/A | CCAGATTTCCCCTCAGGACC[T/C]TCCCCCAAGGGGGCACCCAA |
| Aminopeptidase P (membrane-bound) | XPNPEP2 | AE100s4 | 5 | 392 | 1 | GGCCACTGACAAGGCCTCAG[C/T]CCAAGCTGAGCCTCATCCTA |
| Aminopeptidase P (membrane-bound) | XPNPEP2 | AE100s5 | 6 | 432 | 1 | AGAAAGGGTTGGAGTGAGGG[T/C]TGGGGCCCGAGTCTCTTTTT |
| Aminopeptidase P (membrane-bound) | XPNPEP2 | AE100s6 | 7 | 258 | 1 | AGCACTCCCCAGGCCACCCG[G/T]CTTTTATTATACCCTCTATG |
| Aminopeptidase P (membrane-bound) | XPNPEP2 | AE100s7 | 10 | 461 | N/A | TTTGTTTGAGGAAAGGGTTT[G/T]GCTGCTTTTTAAGAGGATGC |
| Aminopeptidase P (membrane-bound) | XPNPEP2 | AE100s8 | 13 | 273 | 1 | CCTGCCAGTCCTCTGAAAAC[A/G]CCCCTGTGCCATGGAGACCT |
| Aminopeptidase P (membrane-bound) | XPNPEP2 | AE100s9 | 13 | 324 | 1 | TAGAGAGCATTGCCACGAAA[T/C]GGTGGCAAATCTCACGTCTG |
| Aminopeptidase P (membrane-bound) | XPNPEP2 | AE100s10 | 14 | 856 | 0 | TTGCAAACCTTAGCATGCAC[C/G]TGAGTCACCTGGGATGCTTG |
| Aminopeptidase P (membrane-bound) | XPNPEP2 | AE100s11 | 15 | 187 | N/A | GAAGCCCAGGCCCCAGAGGT[C/T]CTCCCACCAAGGCCTCCCAC |
| Aminopeptidase P (membrane-bound) | XPNPEP2 | AE100s12 | 15 | 194 | 0 | AGGCCCCAGAGGTCCTCCCA[C/T]CAAGGCCTCCCAGGTGACCC |
| Aminopeptidase P (membrane-bound) | XPNPEP2 | AE100s13 | 15 | 218 | 0 | GGCCTCCCACGTGACCCAGT[G/A]CAGGGTTAGGCTGCCCTTCT |
| Aminopeptidase P (membrane-bound) | XPNPEP2 | AE100s14 | 8 | 221 | N/A | GGAAAGGCCTGAAGGAAGAG[G/C]CCGGGGAAAGAGCCCTCCCT |
| Aminopeptidase P (membrane-bound) | XPNPEP2 | AE100s15 | 8 | 243 | 1 | ACCCTCTGTCTGCTCGAGCC[C/T]AGGAAAGGCCTGAAGGAAGA |
| Aminopeptidase P (membrane-bound) | XPNPEP2 | AE100s16 | 14 | 139 | 1 | CTTGCCTCAGGCAGATCAGC[A/G]TTAAATATTCCTTGTCAATT |
| Aminopeptidase P (membrane-bound) | XPNPEP2 | AE100s17 | 22 | 809 | 1 | ACTGATACCATGTTTATGTC[T/G]TCCTTTCTAGGGCCAGTGGG |
| Aminopeptidase P (membrane-bound) | XPNPEP2 | AE100s18 | 22 | 984 | 1 | AAATAAATAATAAAAGCCAG[A/C]GCCAATCTGGTGTGTGCCAG |
| Aminopeptidase P (membrane-bound) | XPNPEP2 | AE100s19 | 26 | 195 | 1 | CTCCTCTGGCTCCTCCTCCC[G/A]TCCTCCATATCACCTCTTCC |
| Aminopeptidase P (membrane-bound) | XPNPEP2 | AE100s20 | 27 | 308 | 0 | ACCTCTTGGCAGCTTGGCTT[A/G]GAGAGGCTGTCACCCCTTCT |
| Aminopeptidase P (membrane-bound) | XPNPEP2 | AE100s21 | 27 | 695 | N/A | CCTATGGAGAAGGTCCCAGG[C/A]CCCAGGAACAGAGGGCTTCT |
| Aminopeptidase P (membrane-bound) | XPNPEP2 | AE100s22 | 28 | 710 | 0 | CCGGGGTTGTATACCACACC[C/G]TGGGCCCCTAATCCCAGGCC |
| Aminopeptidase P (membrane-bound) | XPNPEP2 | AE100s23 | 28 | 1369 | 0 | CAGATGAGCCAGCATTCCAG[C/T]TCTTTCAGGGTTCAGCAACA |
| Bradykinin Receptor B1 | BDKRB1 | AE103s1 | 6 | 307 | 0 | AATTTATGTCTTTGTGGGCC[G/A]GCTCTTCAGGACCAAGGTCT |
| Bradykinin Receptor B1 | BDKRB1 | AE103s2 | 4 | 273 | 1 | CTGCTGCACAGAGTGCTGCC[G/A]ACATTTATCATCTCCATCTG |
| Bradykinin Receptor B1 | BDKRB1 | AE103s3 | 7 | 958 | 1 | AGAAGCTTGGCTTTCTTATC[A/G]ATTCTTTGTGACATAATAAA |
| Bradykinin Receptor B1 | BDKRB1 | AE103s4 | 1 | 196 | 1 | TGTTGTTGTTGAGACAGGGT[C/T]TCAGTCCGTCGGCCCAGACT |
| Bradykinin Receptor B1 | BDKRB1 | AE103s5 | 7 | 240 | 1 | ATAGTGCTAGGATTATAGGC[G/A]TGGCCACTGCGCCTGGCCCC |
| Bradykinin Receptor B2 | BDKRB2 | AE104s1 | 10 | 86 | N/A | CAAATCTGCAGGGCTCCCCC[C/G]ACCGCGCCCAGGTGGGCCCC |
| Bradykinin Receptor B2 | BDKRB2 | AE104s2 | 10 | 87 | 0 | AAATCTGCAGGGCTCCCCCC[A/G]CCGCGCCCAGGTGGGCCCCT |
| Bradykinin Receptor B2 | BDKRB2 | AE104s3 | 10 | 462 | 0 | AAGGGCTGGCTGAGGTCATG[T/A]TCCCCCTCTGAGACTCAGTT |
| Bradykinin Receptor B2 | BDKRB2 | AE104s4 | 10 | 542 | 0 | CAGGGAGAGCTGGGATGAGG[C/T]CTGGGGTGCTGCCTGTGGGG |
| Bradykinin Receptor B2 | BDKRB2 | AE104s5 | 10 | 557 | 0 | TGAGGCCTGGGGTGCTGCCT[G/A]TGGGGACAGCACGCATGCTT |
| Bradykinin Receptor B2 | BDKRB2 | AE104s6 | 10 | 717 | N/A | TGCTGCCAGGGCCCGAAGAC[G/A]CAGCACAGTTTTTTCTCCAG |
| Bradykinin Receptor B2 | BDKRB2 | AE104s7 | 7 | 408 | 1 | GCCCTGGAGGGAGCAGGGGG[G/C]TTGTGGGACACAGACTTGGA |
| Bradykinin Receptor B2 | BDKRB2 | AE104s8 | 5 | 275 | 1 | GGGAACTGAGGCAGGGACAG[A/G]TGGTTGTGCAATAGTTATTG |
| Bradykinin Receptor B2 | BDKRB2 | AE104s9 | 5 | 390 | 1 | TCCCAGTTACGTCTGCGTAA[T/A]GATGCCTCACATGTACGTAG |
| Bradykinin Receptor B2 | BDKRB2 | AE104s10 | 5 | 527 | 1 | TGACAGGTGGAAGGGAGCCA[A/G]TGAGCACCTACTGTGTGCCA |
| Bradykinin Receptor B2 | BDKRB2 | AE104s11 | 6 | 579 | 0 | ATAACAGCTCATTGAGTCTT[T/G]CACAGGACAGATGTTCTTTA |
| Bradykinin Receptor B2 | BDKRB2 | AE104s12 | 6 | 585 | 0 | GCTCATTGAGTCTTTGACAG[G/T]ACAGATGTTCTTTATCAGGG |
| Bradykinin Receptor B2 | BDKRB2 | AE104s13 | 6 | 727 | N/A | AAGAGAGTCTCAGACCATCA[C/T]GTGCTCTGGTGCTGAATGAC |
| Bradykinin Receptor B2 | BDKRB2 | AE104s14 | 8 | 482 | N/A | GCCGATGGTGAACACCATTG[C/T]CATTCCTTTTCACACTCTTC |
| Bradykinin Receptor B2 | BDKRB2 | AE104s16 | 9 | 1010 | 1 | TATGGAGACAGACTAGGCAA[G/A]TTTTGTTTAATAAATGAGTG |
| Bradykinin Receptor B2 | BDKRB2 | AE104s17 | 9 | 1072 | 1 | TGAGCGATGAGCCCCAGGTT[C/T]CTGGCATGGATGGATGGATG |
| Tachyldrnin Receptor 1 | TACR1 | AE106s1 | 1 | 614 | 1 | GCGAAGACAGCGGCGATGGG[A/G]AAGAAGTTGTGGAACTTGCA |
| Tachyldrnin Receptor 1 | TACR1 | AE106s2 | 2 | 789 | N/A | AGCAGGAGAGCCAGGACCCA[G/T]ATGACACAGATGACCACTTT |
| Tachyldrnin Receptor 1 | TACR1 | AE106s3 | 4 | 676 | 0 | GGGTGGGTTAGTTCTGCCTG[T/G]CCCCTGCTCACCTTGCGCTT |
| Tachyldrnin Receptor 1 | TACR1 | AE106s4 | 6 | 152 | 0 | CAGAATGGAATGAATGGGCT[T/C]TTGGGAAAAGCTGGTCCGAC |
| Tachyldrnin Receptor 1 | TACR1 | AE106s5 | 6 | 220 | 0 | CAGTGATTTGGTTTGAGTCA[C/A]ACAGCATGAGGGTGGCAAAG |
| Tachyldrnin Receptor 1 | TACR1 | AE106s6 | 6 | 317 | N/A | CTGACCCTTTTTGCAAGTCC[C/T]AGTGTGAGGGTGTTTCTGAT |
| Tachyldrnin Receptor 1 | TACR1 | AE106s7 | 6 | 611 | 0 | TTGGAGGTCAGGTCCAGGGA[C/T]GAGGGTGTGGCCTTGGGGCC |
| C1 Esterase Inhibitor | C1NH | AE105s1 | 3 | 319 | 0 | CGCTGGGGAAAGAAAGGACA[G/A]AGGGAATGTTGGAGCTACAG |
| C1 Esterase Inhibitor | C1NH | AE105s2 | 5 | 158 | 0 | GCGGTAGGAAGACTGTTAAG[A/G]TGCATCTCTTATTTTCTAGG |
| C1 Esterase Inhibitor | C1NH | AE105s3 | 6 | 366 | 0 | CGCATCAAAGTGACGACCAG[C/T]CAGGATATGCTCTCAATCAT |
| C1 Esterase Inhibitor | C1NH | AE105s4 | 7 | 588 | 0 | TATCTCCAAGATGCTATTCG[T/C]TGAACCCATCCTGGAGGTTT |
| C1 Esterase Inhibitor | C1NH | AE105s5 | 7 | 997 | 0 | GCTCTACCACGCCTTCTCAG[C/G]AATGAAGAAGGTGGAGACCA |
| C1 Esterase Inhibitor | C1NH | AE105s6 | 8 | 276 | N/A | TGCAGCAGCCCTTCCTCTTC[G/A]TGCTCTGGGACCAGCAGCAC |
| Kallikrein 1 (renal/pancreas/salivary) | KLK1 | AE107S1 | 1 | 153 | 1 | TCCTGCCTAATGATGAGTGC[A/G]AAAAAGCCCACGTCCAGAAG |
| Kallikrein 1 (renal/pancreas/salivary) | KLK1 | AE107S2 | 1 | 299 | 1 | CAGACTGTGTAGCCCAAGGC[G/A]GGGATGGGGACTCCTGCGTC |
| Kallikrein 1 (renal/pancreas/salivary) | KLK1 | AE107S3 | 2 | 806 | 0 | AGGTCGTGGAGTTGCCCACC[G/C]AGGAACCCGAAGTGGGGAGC |
| Kallikrein 1 (renal/pancreas/salivary) | KLK1 | AE107S4 | 2 | 717 | 0 | GGCGGGGATGGGGACTCCTG[C/T]GTCCAAGGGAGAAAGGGCCA |
| Kallikrein 1 (renal/pancreas/salivary) | KLK1 | AE107S5 | 4 | 632 | 1 | GGGCCACCCCAGCTGTGTCA[A/G]TCTCATGCCTGGAAGTCTGA |
| Kallikrein 1 (renal/pancreas/salivary) | KLK1 | AE107S6 | 4 | 607 | 1 | TGTCACGTTCTGCCATCACC[T/C]ATCTTTCCAGATGTGGTGCA |
| Bradykinin Receptor B1 | DDKRB1 | AE103s6 | 1 | 67 | N/A | CTCCTCTGCCGTGTCATCAA[C/T]GGGGTCATCAAGGCCAATTT |
| Bradykinin Receptor B1 | DDKRB1 | AE103s7 | 1 | 181 | 0 | GGAAGGCAGCAGCGGCGGAG[G/A]CAGGCCCGGGTCACCTGCGT |
| Bradykinin Receptor B1 | DDKRB1 | AE103s8 | 1 | 296 | 0 | TGAACATCACCGCCTGCATC[C/G]TGCTCCTCCCCCATGAGGCC |
| Bradykinin Receptor B1 | DDKRB1 | AE103s9 | 2 | 136 | 0 | GCCTCCCTGCGAACGCGGGA[G/A]GAGGTCAGCAGGACAAGAGT |
| Bradykinin Receptor B2 | BDKRB2 | AE104s16 | 7 | 202 | 1 | CTGGGGATTGCAAAATACAC[G/T]CATTCTCCAGCAGGGAGGAG |
| Bradykinin Receptor B2 | BDKRB2 | AE104s19 | 7 | 339 | 1 | GGTGGGCAGGGAGTCCTCAC[G/A]AACAGACAGAAACATTGATA |
| Bradykinin Receptor B2 | BDKRB2 | AE104s20 | 2 | 271 | N/A | AGCCTTAAAACCCTTCCTTC[A/C]GAAGAGAACAGATAAGAGTG |
| Bradykinin Receptor B2 | BDKRB2 | AE104s21 | 3 | 408 | 1 | AGCTGTCCTGTTTCCTGGGT[A/G]CGGGTGTTTGCGCTCCCCTG |
| Bradykinin Receptor B2 | BDKRB2 | AE104s22 | 3 | 463 | 1 | AGTCCTGGGATTTCTTTGTA[T/C]GCCACGTACGGCTCCCAAGG |
| Bradykinin Receptor B2 | BDKRB2 | AE104s23 | 3 | 886 | 1 | CATCTTTCAAGGGATGGGTA[G/A]TGATGTCATCAGCCTCCTGG |
| Bradykinin Receptor B2 | BDKRB2 | AE104s24 | 4 | 916 | 1 | GAGGCGATCTGTGTGATTAC[A/G]TCGATGATGCGCTCGTCCTG |
| Bradykinin Receptor B2 | BDKRB2 | AE104s25 | 4 | 1048 | 1 | TGGGTTCTGACCTGCAGCCC[C/T]CTTTCTGGCACACTCCCTGG |
| Bradykinin Receptor B2 | BDKRB2 | AE104s26 | 4 | 1543 | 1 | TTGGACCAAAGCTGGATGGC[A/G]GTTCTCCTGGAGATCTAAGT |
| Bradykinin Receptor B2 | BDKRB2 | AE104s27 | 4 | 1826 | 1 | GGTGGTGGCAGTGCCCAGTC[G/A]TTCCCACTTGAGTCTTTGAG |
| Bradykinin Receptor B2 | BDKRB2 | AE104s28 | 4 | 2102 | 1 | TCCCAGTTACGTCTGCGTAA[T/A]GATGCCTCACATGTACGTAG |
| Bradykinin Receptor B2 | BDKRB2 | AE104s29 | 4 | 2239 | 1 | TGACAGGTGGAAGGGAGCCA[A/G]TGAGCACCTACTGTGTGCCA |
| Anglotensin Convertng Enzyme 2 | ACE2 | AE109s1 | 7 | 55 | 0 | ACTTATAGTTTTGAAAAGAA[C/A]CACATGGCCTCTCTTCTTTC |
| Anglotensin Convertng Enzyme 2 | ACE2 | AE109s2 | 10 | 37 | 1 | TCCAGATGTACATATATTTA[C/T]ATCTATGATCTATGGTTTCT |
| Anglotensin Convertng Enzyme 2 | ACE2 | AE109s3 | 10 | 290 | 1 | GACAAGGAATGGGTGTGAAA[C/G]TTGTCAACTGGGTGTACTCA |
| Anglotensin Convertng Enzyme 2 | ACE2 | AE109s4 | 11 | 282 | 0 | CACTACTAAAAATTAGTAGC[C/T]TACCTGGTTCAAGTAATAAG |
| Anglotensin Convertng Enzyme 2 | ACE2 | AE109s5 | 11 | 440 | 0 | TTTGCTGAAGAGAATGCTAA[T/C]ATAAAGATATCCTTTTGACC |
| Anglotensin Convertng Enzyme 2 | ACE2 | AE109s6 | 15 | 109 | 0 | GTAAATGACTCAGAATAATG[C/T]TTGGCACACAGGAAGAACAC |
| Anglotensin Convertng Enzyme 2 | ACE2 | AE109s7 | 15 | 241 | 0 | GTAGGAATGATATCAGACAC[A/G]TTTTTAGGTGCAGTGACAAA |
| Protease Inhibitor | PI4 | AE110s1 | 2 | 447 | 0 | CTAGCTCTGTGGCCTGCAGA[T/G]GTCCTGTACCTTCTTTTCAT |
| Protease Inhibitor | PI4 | AE110s2 | 2 | 526 | 0 | AGGACCACTCCCAAAGACTT[C/T]TATGTTGATGAGAAGAGAAC |
| Protease Inhibitor | PI4 | AE110s3 | 3 | 168 | 1 | GCTTGTTCATTAATCTAATG[T/C]TCTAACTCAATGCCCCTTTC |
| Protease Inhibitor | PI4 | AE110s4 | 3 | 969 | 1 | GAGGTGGTCTGAGCCGAAGC[T/A]GTTTGTGGGGACAGAACTCA |
| Protease Inhibitor | PI4 | AE110s5 | 4 | 563 | 1 | AAGATTGTGGATTTGGTCAG[T/C]GAGCTCAAGAAGGACGTCTT |
| Protease Inhibitor | PI4 | AE110s6 | 4 | 1628 | 1 | CTAAAATAAACTCTGAGGAT[A/T]GCCATCCTCCATGCAAAATC |
| Protease Inhibitor | PI4 | AE110s7 | 4 | 1885 | 1 | CATATAAAGCACTCCACAGA[T/G]GTTTGTGGAACAGACCCTAA |
| Protease Inhibitor | PI4 | AE110s8 | 4 | 1816 | 1 | CGGGTACCAATTCTATCCCC[A/G]CAACTTTGGGCAGGTCACTT |
| Protease Inhibitor | PI4 | AE110s9 | 4 | 2020 | 1 | CAAACAAACAAACAAACAAC[C/G]AAACAAACAAAAAAAACTCA |
| Aminopeptidase P (membrane-bound) | XPNPEP2 | AE100s24 | 6 | 363 | 1 | GTGTGGCTGCAACCAGACCT[C/T]ACCCGGCTCCTCTGTTTCCC |
| Aminopeptidase P (membrane-bound) | XPNPEP2 | AE100s25 | 13 | 83 | 1 | AGTCCACGTTGAAGGTCCGA[G/A]GCCCCTAGCCCTGTGGGGGC |
| Aminopeptidase P (membrane-bound) | XPNPEP2 | AE100s26 | 13 | 181 | 1 | TTTTCTAGGGCCCTGTTGGG[G/A]CATCCTGTTGTGTGTGTAGA |
| Aminopeptidase P (membrane-bound) | XPNPEP2 | AE100s27 | 18 | 112 | 0 | AAGGCTGACCTTCCAGGAAC[C/T]GAGTGCCAAAGGCAAGGTCT |
| Aminopeptidase P (membrane-bound) | XPNPEP2 | AE100s28 | 21 | 261 | 0 | CCCAAGGGTGCCATGGTCCC[G/A]GGAGAGCCCAAACCTATCAC |
| Aminopeptidase P (membrane-bound) | XPNPEP2 | AE100s29 | 21 | 293 | 0 | ACCTATCACCACCTGTTGGG[C/T]ATAGCCAGAGCTGTTCCCAC |
| Aminopeptidase P (membrane-bound) | XPNPEP2 | AE100s30 | 22 | 144 | 1 | TGGCTCCTCACCGAGATTCC[T/C]GCTGGAGGGCGTGTGGGTTT |
| Bradykinin Receptor B1 | BDKRB1 | AE103s10 | 7 | 766 | 0 | GGTCAGCAGGAGAAGAGTGC[G/A]GGGGCCGAAGGATAGCAAGA |
| Bradykinin Receptor B1 | BDKRB1 | AE103s11 | 7 | 1202 | 0 | GAATTATCCAAGTGGGCCCT[A/G]TATAATCACAAGGGTCCTTA |
| Bradykinin Receptor B1 | BDKRB1 | AE103s12 | 7 | 1806 | 0 | CTGGTCTCAAACTCAAGGGC[T/G]CAAGTGATCCTCCACTTTGG |
| Bradykinin Receptor B1 | BDKRB1 | AE103s13 | 7 | 1946 | 0 | GGAAACAAATAACAAGTATC[G/A]GGTAATGGCCTCTCTTATTA |
| Bradykinin Receptor B1 | BDKRB1 | AE103s14 | 7 | 1964 | 0 | TCGGGTAATGGCCTCTCTTA[T/C]TACACTTCCATTTGTCTATT |
| Bradykinin Receptor B2 | BDKRB2 | AE104s30 | 2 | 106 | 1 | ATACCTGTTACTGCCTTTAA[C/T]CCTCACAACGACTTCATGTT |
| Bradykinin Receptor B2 | BDKRB2 | AE104s31 | 3 | 93 | 0 | AGGCCGTGGTGGGCACGGAG[T/G]CCTCACGAACAGACAGAAAC |
| Bradykinin Receptor B2 | BDKRB2 | AE104s32 | 3 | 402 | 0 | TAATAACTGCAAACTGACCT[G/A]AGTACAGTGAAAAATCAAGC |
| Bradykinin Receptor B2 | BDKRB2 | AE104s33 | 3 | 404 | 0 | ATAACTGCAAACTGACCTGA[G/A]TACAGTGAAAAATCAAGCAA |
| Bradykinin Receptor B2 | BDKRB2 | AE104s34 | 6 | 349 | 0 | CCAATACTGATTCTGCTCCA[C/T]GGAGCTATTTCTAGACCTCA |
| Bradykinin Receptor B2 | BDKRB2 | AE104s35 | 6 | 364 | 0 | TCCACGGAGCTATTTCTAGA[C/A]CTCAGTGTCTTTTCCTTATA |
| Bradykinin Receptor B2 | BDKRB2 | AE104s36 | 6 | 619 | 0 | GCACCCTGCTCGACCGTCTC[G/A]TCGAACAGCTTTCTGGTGGT |
| Protease Inhibitor 4 | PI4 | AE110s10 | 2 | 397 | 1 | ACCGAGGCTGCAGCAGCCAC[C/G]ACGTTCGCGATCAAATTCTT |
| Protease Inhibitor 4 | PI4 | AE110s11 | 4 | 304 | 1 | CCGGCCATGGGCTGGAAACA[C/T]GCGTGGGCAGTGCTCTGTTC |
| Protease Inhibitor 4 | PI4 | AE110s12 | 4 | 1392 | 1 | GACAGATGTTCATTATGAAA[C/T]GGGTACCAATTCTATCCCCA |
| Tachykinin Receptor 1 | TACR1 | AE106s8 | 2 | 92 | 0 | TGGCCACTGTGTATGTAGAT[G/A]GTCTTGTGGCCCCTGGAGAG |
| Tachykinin Receptor 1 TACR1 | AE106s9 | 3 | 405 | 1 | GGATATTTTGTGCTAGCTGC[C/A]TCTGGGGCTCACAAGTGTGC | |
| Anglotensin Converting Enzyme 2 | ACE2 | AE109s8 | 12 | 359 | 1 | AAAGAAACATTCTCAGCTGT[G/T]TCACAAGTCCTCATGAGACT |
| Anglotensin Converting Enzyme 2 | ACE2 | AE109s9 | 20 | 123 | 0 | ATAACAAAGAGCCAAGTACA[C/T]GAAGAATTCATGGGGCTTCT |
| Kallikrein 1 (renal/pancreas/salivary) | KLK1 | AE107s2 | 1 | 299 | 0 | GACGCAGGAGTCCCCATCC[C/Tπ CGCCTTGGGCTACACAGTCTG |

| REFSEQ_FLANK REF (SEQ ID NO:) | REFSEQ ALT (SEQ ID NO:) | REF_SEQ_ID | REF_SEQ_POS | REF_NT | ALT_NT | EXON | MUTATION TYPE | REVCOMP | REF_CODON | ALT_CODON |
|---|---|---|---|---|---|---|---|---|---|---|
| 163 | 226 | AL023653.1 | 62896 | C | G | Exon20 | Silent | 0 | CCC | CCG |
| 164 | 227 | AL023653.1 | 60150 | C | T | Interon3 | Non-CDS | 0 | | |
| 165 | 228 | AL023653.1 | 74483 | T | C | Interon15 | Non-CDS | 0 | | |
| 166 | 229 | AL023653.1 | 74651 | C | T | Interon15 | Non-CDS | 0 | | |
| 167 | 230 | AL023653.1 | 54549 | T | C | Interon1 | Non-CDS | 0 | | |
| 168 | 231 | AL023653.1 | 75521 | C | T | Interon7 | Non-CDS | 0 | | |
| 169 | 232 | AL023653.1 | 55588 | C | T | Interon7 | Non-CDS | 0 | | |
| 170 | 233 | AL023653.1 | 68286 | A | G | Interon10 | Non-CDS | 0 | | |
| 171 | 234 | AL023653.1 | 68235 | T | C | Interon10 | Non-CDS | 0 | | |
| 172 | 235 | AL023653.1 | 63088 | C | G | Interon7 | Non-CDS | 0 | | |
| 173 | 236 | AL023653.1 | 71620 | C | T | Interon13 | Non-CDS | 0 | | |
| 174 | 237 | AL023653.1 | 71627 | C | T | Interon13 | Non-CDS | 0 | | |
| 175 | 238 | AL023653.1 | 71651 | G | A | Interon13 | Non-CDS | 0 | | |
| 176 | 239 | AL023653.1 | 64358 | G | C | Exon1 | Non-CDS | 0 | | |
| 177 | 240 | AL023653.1 | 54334 | C | T | Exon1 | Non-CDS | 0 | | |
| 178 | 241 | AL023653.1 | 66924 | A | G | Interon6 | Non-CDS | 0 | | |
| 179 | 242 | AL023653.1 | 77205 | T | G | Interon17 | Non-CDS | 0 | | |
| 180 | 243 | AL023653.1 | 77052 | A | C | Interon17 | Non-CDS | 0 | | |
| 181 | 244 | AL023653.1 | 75689 | G | A | Interon16 | Non-CDS | 0 | | |
| 182 | 245 | AL023653.1 | 83469 | A | G | Interon20 | Non-CDS | 0 | | |
| 183 | 246 | AL023653.1 | 83858 | C | A | Exon21 | Non-CDS | 0 | | |
| 184 | 247 | AL023653.1 | 83926 | C | G | Exon21 | Non-CDS | 0 | | |
| 185 | 248 | AL023653.1 | 84585 | C | T | Exon21 | Non-CDS | 0 | | |
| 186 | 249 | U48231.1 | 2207 | G | A | Exon2 | Missense | 0 | CGG | CAG |
| 187 | 250 | U48231.1 | 1360 | G | A | Exon2 | Silent | 0 | CCG | CCA |
| 188 | 251 | U48231.1 | 2355 | A | G | Exon3 | Non-CDS | 0 | | |
| 189 | 252 | U48231.1 | 230 | C | T | Exon1 | Non-CDS | 0 | | |
| 190 | 253 | U48231.1 | 3072 | G | A | Exon3 | Non-CDS | 0 | | |
| 191 | 254 | AL355102.2 | 96426 | C | G | Interon1 | Non-CDS | 1 | | |
| 192 | 255 | AL355102.2 | 96427 | A | G | Interon1 | Non-CDS | 1 | | |
| 193 | 256 | AL355102.2 | 98802 | T | A | Interon1 | Non-CDS | 1 | | |
| 194 | 257 | AL355102.2 | 98882 | C | T | Interon1 | Non-CDS | 1 | | |
| 195 | 258 | AL355102.2 | 96697 | G | A | Interon1 | Non-CDS | 1 | | |
| 196 | 259 | AL355102.2 | 99056 | G | A | Interon1 | Non-CDS | 1 | | |
| 197 | 260 | AL355102.2 | 66389 | G | C | Interon2 | Non-CDS | 1 | | |
| 198 | 261 | AL355102.2 | 62653 | A | G | Exon3 | Non-CDS | 1 | | |
| 199 | 262 | AL355102.2 | 62736 | T | A | Exon3 | Non-CDS | 1 | | |
| 200 | 263 | AL355102.2 | 62601 | A | G | Exon3 | Non-CDS | 1 | | |
| 201 | 264 | AL355102.2 | 61132 | T | G | Exon3 | Non-CDS | 1 | | |
| 202 | 265 | AL355102.2 | 61138 | G | T | Exon3 | Non-CDS | 1 | | |
| 203 | 266 | AL355102.2 | 61280 | C | T | Exon3 | Non-CDS | 1 | | |
| 204 | 267 | AL355102.2 | 62290 | C | T | Exon3 | Non-CDS | 1 | | |
| 205 | 268 | AL355102.2 | 60403 | G | A | 3′Flank | Non-CDS | 1 | | |
| 206 | 269 | AL355102.2 | 60341 | C | T | 3′FlanK | Non-CDS | 1 | | |
| 207 | 270 | AC007681.3 | 103685 | A | G | Exon1 | Silent | 1 | TTT | TTC |
| 208 | 271 | AC007681.3 | 25759 | G | T | Exon2 | Silent | 1 | ATC | TCA |
| 209 | 272 | AC007681.3 | 143458 | T | G | Interon3 | Non-CDS | 1 | | |
| 210 | 273 | AC007681.3 | 139028 | T | C | Exon5 | Non-CDS | 1 | | |
| 211 | 274 | AC007681.3 | 139096 | C | A | Exon5 | Non-CDS | 1 | | |
| 212 | 275 | AC007681.3 | 139193 | C | T | Exon5 | Non-CDS | 1 | | |
| 213 | 276 | AC007681.3 | 139387 | C | T | Exon5 | Silent | 1 | TCG | TCA |
| 214 | 277 | X54486.1 | 5755 | G | A | Interon4 | Non-CDS | 0 | | |
| 215 | 278 | X54486.1 | 15193 | A | G | Interon6 | Non-CDS | 0 | | |
| 216 | 279 | X54486.1 | 15401 | C | T | Exon7 | Silent | 0 | AGC | AGT |
| 217 | 280 | X54486.1 | 3403 | T | C | Exon3 | Missense | 0 | GTT | GCT |
| 218 | 281 | X54486.1 | 3802 | C | G | Exon3 | Missense | 0 | GCA | GGA |
| 219 | 282 | X54486.1 | 10812 | G | A | Exon8 | Missense | 0 | GTG | ATG |
| 220 | 283 | AF277050.1 | 4773 | A | G | Exon4 | Missense | 0 | AAA | GAA |
| 221 | 284 | AF277050.1 | 4827 | G | A | Interon3 | Non-CDS | 0 | | |
| 222 | 285 | AF277050.1 | 4532 | G | C | Exon3 | Missense | 0 | GAG | CAG |
| 223 | 286 | AF277050.1 | 4644 | C | T | Interon3 | Non-CDS | 0 | | |
| 224 | 287 | AF277050.1 | 5693 | A | G | 3 Flank | Non-CDS | 0 | | |
| 225 | 288 | AF277050.1 | 5828 | T | C | 3 Flank | Non-CDS | 0 | | |
| 643 | 675 | U48231.1 | 1599 | C | T | Exon3 | Silent | 0 | AAC | AAT |
| 644 | 676 | U48231.1 | 1713 | G | A | Exon3 | Silent | 0 | AGG | AGA |
| 645 | 677 | U48231.1 | 1828 | C | G | Exon3 | Missense | 0 | CTG | GTG |
| 646 | 678 | U48231.1 | 1956 | G | A | Exon3 | Silent | 0 | GAG | GAA |
| 647 | 679 | AL365102.2 | 66174 | G | T | Interon10 | Non-CDS | 1 | | |
| 648 | 680 | AL365102.2 | 68037 | G | A | Exon2 | Missense | 1 | CGT | TGT |
| 649 | 681 | AL365102.2 | 10176 | A | C | 5′Flank | Non-CDS | 1 | | |
| 650 | 682 | AL365102.2 | 100859 | A | G | 5′Flank | Non-CDS | 1 | | |
| 651 | 683 | AL365102.2 | 100804 | T | C | 5′Flank | Non-CDS | 1 | | |
| 652 | 684 | AL365102.2 | 100381 | G | A | 5′Flank | Non-CDS | 1 | | |
| 653 | 685 | AL365102.2 | 63922 | A | G | Exon3 | Silent | 1 | GAT | GAC |
| 654 | 686 | AL365102.2 | 63974 | C | T | Exon3 | Missense | 1 | GGG | GAG |
| 655 | 687 | AL365102.2 | 63297 | A | G | Exon3 | Non-CDS | 1 | | |
| 656 | 688 | AL365102.2 | 62978 | G | A | Exon3 | Non-CDS | 1 | | |
| 657 | 689 | AL365102.2 | 62738 | T | A | Exon3 | Non-CDS | 1 | | |
| 658 | 690 | AL365102.2 | 62601 | A | G | Exon3 | Non-CDS | 1 | | |
| 659 | 691 | AC003689.1 | 66127 | C | A | Interon14 | Non-CDS | 1 | | |
| 660 | 692 | AC003689.1 | 96795 | C | T | Interon12 | Non-CDS | 1 | | |
| 661 | 693 | AC003689.1 | 89542 | C | G | Interon13 | Non-CDS | 1 | | |
| 662 | 694 | AC003689.1 | 90184 | C | T | Interon3 | Non-CDS | 1 | | |
| 663 | 695 | AC003689.1 | 90322 | T | C | Interon2 | Non-CDS | 1 | | |
| 664 | 696 | AC003689.1 | 64113 | C | T | Interon16 | Non-CDS | 1 | | |
| 665 | 697 | AC003689.1 | 64245 | A | G | Exon16 | Silent | 1 | AAT | AAC |
| 666 | 698 | L26101.1 | 6653 | T | G | Interon1 | Non-CDS | 0 | | |
| 667 | 699 | L26101.1 | 6734 | C | T | Exon2 | Silent | 0 | TTC | TTT |
| 668 | 700 | L26101.1 | 7821 | T | C | Interon2 | Non-CDS | 0 | | |
| 669 | 701 | L26101.1 | 7720 | T | A | Interon2 | Non-CDS | 0 | | |
| 670 | 702 | L26101.1 | 3797 | T | C | Exon1 | Silent | 0 | AGT | AGC |
| 671 | 703 | L26101.1 | 2732 | A | T | 5′Flank | Non-CDS | 0 | | |
| 672 | 704 | L26101.1 | 2695 | T | G | 5′Flank | Non-CDS | 0 | | |
| 673 | 705 | L26101.1 | 2544 | A | G | 5′Flank | Non-CDS | 0 | | |
| 674 | 706 | L26101.1 | 2340 | C | G | 5′Flank | Non-CDS | 0 | | |
| 910 | 936 | AL023653.1 | 69844 | C | T | Interon11 | Non-CDS | 0 | | |
| 911 | 937 | AL023653.1 | 70896 | G | A | Interon13 | Non-CDS | 0 | | |
| 912 | 938 | AL023653.1 | 70620 | G | A | Interon13 | Non-CDS | 0 | | |
| 913 | 939 | AL023653.1 | 65621 | C | T | Interon7 | Non-CDS | 0 | | |
| 914 | 940 | AL023653.1 | 84097 | G | A | Exon21 | Non-CDS | 0 | | |
| 915 | 941 | AL023653.1 | 84129 | C | T | Exon21 | Non-CDS | 0 | | |
| 916 | 942 | AL023653.1 | 61848 | T | C | Exon5 | Silent | 0 | CCT | CCC |
| 917 | 943 | U48231.1 | 1979 | G | A | Exon3 | Missense | 0 | CGG | CAG |
| 918 | 944 | U48231.1 | 2504 | A | G | Exon3 | Non-CDS | 0 | | |
| 919 | 945 | U48231.1 | 3026 | T | G | Exon3 | Non-CDS | 0 | | |
| 920 | 946 | U48231.1 | 3153 | G | A | Exon3 | Non-CDS | 0 | | |
| 921 | 947 | U48231.1 | 3181 | T | C | Exon3 | Non-CDS | 0 | | |
| 922 | 948 | U48231.1 | 82804 | C | T | Exon3 | Non-CDS | 1 | | |
| 923 | 949 | AL365102.2 | 58030 | T | G | Exon3 | Missense | 1 | GAC | GCC |
| 924 | 950 | AL365102.2 | 68399 | G | A | Interon1 | Non-CDS | 1 | | |
| 925 | 951 | AL365102.2 | 68341 | G | A | Interon1 | Non-CDS | 1 | | |
| 926 | 952 | AL365102.2 | 62672 | C | T | Exon3 | Non-CDS | 1 | | |
| 927 | 953 | AL365102.2 | 62688 | G | A | Exon3 | Non-CDS | 1 | | |
| 928 | 954 | AL365102.2 | 62943 | C | G | Exon3 | Non-CDS | 1 | | |
| 929 | 955 | L26101.1 9169 | C | T | Exon4 | Silent | 0 | ACC | ACG | |
| 930 | 956 | L26101.1 9812 | C | T | Exon1 | Missense | 0 | CGC | TGC | |
| 931 | 957 | L26101.1 2524 | C | T | 5′Flank | Non-CDS | 1 | | | |
| 932 | 958 | AC007400.3 | 14073 | G | A | Interon4 | Non-CDS | 1 | | |
| 933 | 959 | AC007400.3 | 143386 | C | A | Interon3 | Non-CDS | 1 | | |
| 934 | 960 | AC0003689.1 | 69475 | G | T | Interon13 | Non-CDS | 1 | | |
| 935 | 961 | AC0003689.1 | 85668 | C | T | Interon6 | Non-CDS | 1 | | |
| 1574 | 1576 | AF277050.1 | 4627 | G | A | Interon3 | Non-CDS | N/A | | |

| CDNA_SEQ_ID | CDNA_SEQ_POS |
|---|---|
| U90724.1 | 2065 |
| NM_000710.1 | 956 |
| NM_000710.1 | 129 |
| NM_00623.1 | 2002 |
| NM_00623.1 | 2117 |
| NM_00623.1 | 2254 |
| NM_00623.1 | 3604 |
| NM_00623.1 | 3596 |
| NM_00623.1 | 3456 |
| NM_00623.1 | 2565 |
| NM_001068.2 | 543 |
| NM_001068.2 | 872 |
| NM_001056.2 | 1635 |
| NM_001056.2 | 1536 |
| NM_001056.2 | 1344 |
| NM_000062.1 | 1278 |
| NM_000062.1 | 227 |
| NM_000062.1 | 538 |
| NM_000062.1 | 1498 |
| NM_000062.1 | 592 |
| NM_002257.1 | 469 |
| NM_000710.1 | 348 |
| NM_000710.1 | 462 |
| NM_000710.1 | 577 |
| NM_000710.1 | 705 |
| NM_000623.1 | 40 |
| NM_000623.1 | 933 |
| NM_000623.1 | 1061 |
| NM_000623.1 | 1568 |
| NM_000623.1 | 1677 |
| NM_000623.1 | 2117 |
| NM_000623.1 | 2254 |
| AG241254.1 | 2173 |
| NM_006215.1 | 899 |
| NM_006215.1 | 597 |
| U90724.1 | 2689 |
| U90724.1 | 2901711 |
| U90724.1 | 711 |
| NM_000710.1 | 728 |
| NM_000623.1 | 2051 |
| NM_000623.1 | 47 |
| NM_000623.1 | 2183 |
| NM_000623.1 | 2187 |
| NM_006215.1 | 1912 |
| NM_006215.1 | 1143 |
| NM_006215.1 | 412 |

[1476] TABLE VI

| GENE_DESCRIPTION | HGNC_ID | SNP_ID | CONTIG_NUM | CONTIG_POS | REF_AA | ALT_AA | EXON | MUTATION_TYPE | REVCOMP | REF_CODON |
|---|---|---|---|---|---|---|---|---|---|---|
| Aminopeptidase P (membrane-bound) | XPNPEP2 | AE100s1 | 1 | 127 | P | P | Exon20 | Silent | 0 | CCC |
| Bradykinin Receptor B1 | BDKRB1 | AE103s1 | 6 | 307 | R | Q | Exon2 | Missense | 0 | CGG |
| Bradykinin Receptor B1 | BDKRB1 | AE103s2 | 4 | 273 | P | P | Exon2 | Silent | 0 | CCG |
| Tachykinin Receptor 1 | TACR1 | AE106s1 | 1 | 614 | F | F | Exon1 | Silent | 1 | TTT |
| Tachykinin Receptor 1 | TACR1 | AE106s2 | 2 | 789 | I | I | Exon2 | Silent | 1 | ATC |
| Tachykinin Receptor 1 | TACR1 | AE106s7 | 6 | 511 | S | S | Exon5 | Silent | 1 | TCG |
| C1 Esterase Inhibitor | C1NH | AE105s3 | 5 | 366 | S | S | Exon7 | Silent | 0 | AGC |
| C1 Esterase Inhibitor | C1NH | AE105s4 | 7 | 588 | V | A | Exon3 | Missense | 0 | GTT |
| C1 Esterase Inhibitor | C1NH | AE105s5 | 7 | 897 | A | G | Exon3 | Missense | 0 | GCA |
| C1 Esterase Inhibitor | C1NH | AE105s6 | 8 | 278 | V | M | Exon8 | Missense | 0 | GTG |
| Kallikrein 1 (renal/pancreas/salivary) | KLK1 | AE107s1 | 1 | 153 | K | E | Exon4 | Missense | 0 | AAA |
| Kallikrein 1 (renal/pancreas/salivary) | KLK1 | AE107s3 | 2 | 605 | E | Q | Exon3 | Missense | 0 | GAG |
| Bradykinin Receptor B1 | BDKRB1 | AE103s6 | 1 | 87 | N | N | Exon3 | Silent | 0 | AAC |
| Bradykinin Receptor B1 | BDKRB1 | AE103s7 | 1 | 181 | R | R | Exon3 | Silent | 0 | AGG |
| Bradykinin Receptor B1 | BDKRB1 | AE103s8 | 1 | 298 | L | V | Exon3 | Missense | 0 | CTG |
| Bradykinin Receptor B1 | BDKRB1 | AE103s9 | 2 | 136 | E | E | Exon3 | Silent | 0 | GAG |
| Bradykinin Receptor B2 | BDKRB2 | AE104s19 | 7 | 339 | R | C | Exon2 | Missense | 1 | CGT |
| Bradykinin Receptor B2 | BDKRB2 | AE104s24 | 4 | 918 | D | D | Exon3 | Silent | 1 | GAT |
| Bradykinin Receptor B2 | BDKRB2 | AE104s25 | 4 | 1046 | G | E | Exon3 | Missense | 1 | GGG |
| Angiotensin Converting Enzyme 2 | ACE2 | AE109s7 | 15 | 241 | N | N | Exon16 | Silent | 1 | AAT |
| Protease Inhibitor 4 | PI4 | AE110s2 | 2 | 528 | F | F | Exon2 | Silent | 0 | TTC |
| Protease Inhibitor 4 | PI4 | AE110s5 | 4 | 563 | S | S | Exon1 | Silent | 0 | AGT |

| | | | | PROTEIN (SEQ ID | FLANK_SEQ REF | FLANK_SEQ ALT | REFSEQ_FLANK REF |
|---|---|---|---|---|---|---|---|
| GENE_DESCRIPTION | ALT_CODON | PROTEIN_ID | PROTEIN_POS | NO:) | (SEQ ID NO:) | (SEQ ID NO:) | (SEQ ID NO:) |
| Aminopeptidase P (membrane-bound) | CCG | AAB96384.1 | 507 | 4 | 37 | 100 | 163 |
| Bradykinin Receptor B1 | CAG | NP_000701.1 | 317 | 8 | 60 | 123 | 186 |
| Bradykinin Receptor B1 | CCA | NP_000701.1 | 41 | 10 | 61 | 124 | 187 |
| Tachykinin Receptor 1 | TTC | NP_001049.1 | 111 | 16 | 81 | 144 | 207 |
| Tachykinin Receptor 1 | ATA | NP_001049.1 | 154 | 18 | 82 | 145 | 208 |
| Tachykinin Receptor 1 | TCA | NP_001049.1 | 378 | 20 | 87 | 150 | 213 |
| C1 Esterase Inhibitor | AGT | NP_000053.1 | 406 | 24 | 90 | 153 | 216 |
| C1 Esterase Inhibitor | GCT | NP_000053.1 | 58 | 26 | 91 | 154 | 217 |
| C1 Esterase Inhibitor | GGA | NP_000053.1 | 159 | 28 | 92 | 155 | 218 |
| C1 Esterase Inhibitor | ATG | NP_000053.1 | 480 | 30 | 93 | 156 | 219 |
| Kallikrein 1 (renal/pancreas/salivary) | GAA | NP_002248.1 | 186 | 34 | 94 | 157 | 220 |
| Kallikrein 1 (renal/pancreas/salivary) | CAG | NP_002248.1 | 145 | 36 | 96 | 159 | 222 |
| Bradykinin Receptor B1 | AAT | NP_000701.1 | 114 | 556 | 579 | 611 | 643 |
| Bradykinin Receptor B1 | AGA | NP_000701.1 | 152 | 558 | 580 | 612 | 644 |
| Bradykinin Receptor B1 | GTG | NP_000701.1 | 191 | 560 | 581 | 613 | 645 |
| Bradykinin Receptor B1 | GAA | NP_000701.1 | 233 | 562 | 582 | 614 | 646 |
| Bradykinin Receptor B2 | TGT | NP_000614.1 | 14 | 564 | 584 | 618 | 648 |
| Bradykinin Receptor B2 | GAC | NP_000614.1 | 311 | 566 | 589 | 621 | 653 |
| Bradykinin Receptor B2 | GAG | NP_000614.1 | 354 | 568 | 590 | 622 | 654 |
| Angiotensin Converting Enzyme 2 | AAC | AAF78220.1 | 690 | 843 | 601 | 633 | 665 |
| Protease Inhibitor 4 | TTT | NP_006206.1 | 233 | 574 | 603 | 635 | 667 |
| Protease Inhibitor 4 | AGC | NP_006206.1 | 199 | 576 | 606 | 636 | 670 |

[1477]

[image]

[image]

[image]

[image]

| GENE DESCRIPTION | HGNC_ID | SNP_ID | EXON | REVCOMP | PCR Ampilcon_Name | Target_Name | PCR Left primer |
|---|---|---|---|---|---|---|---|
| Aminopeptidase P membrane-bound | XPNPEP2 | AE100s1 | Exon20 | 0 | AE100p77p78 | XPNPEP2_X20a | AGTGCTCCTTCCTTCCCTTC |
| Aminopeptidase P membrane-bound | XPNPEP2 | AE100s2 | Intron3 | 0 | AE100p9p10 | XPNPEP2_X3a | CAGCCCAGGCATCTTAATCTA |
| Aminopeptidase P membrane-bound | XPNPEP2 | AE100s3 | Intron15 | 0 | AE100p57p58 | XPNPEP2_X15a | TAGCTGTCTTCTTCCTTTCGC |
| Aminopeptidase P membrane-bound | XPNPEP2 | AE100s4 | Intron15 | 0 | AE100p57p58 | XPNPEP2_X1a | TAGCTGTCTTCTTCCTTTCGC |
| Aminopeptidase P membrane-bound | XPNPEP2 | AE100s5 | Intron1 | 0 | AE100p1p2 | XPNPEP2_X7a | TGATTGAGACCAGCTGTTGTG |
| Aminopeptidase P membrane-bound | XPNPEP2 | AE100s6 | Intron7 | 0 | AEl00p25p26 | XPNPEP2_X7a | CCAGCGTGGGCATACATG |
| Aminopeptidase P membrane-bound | XPNPEP2 | AE100s7 | Intron7 | 0 | AE100p25p26 | XPNPEP2_X7a | CCAGCGTGGGCATACATG |
| Aminopeptidase P membrane-bound | XPNPEP2 | AE100s8 | Intron10 | 0 | AE100p37p38 | XPNPEP2_X10a | CTTCCTTTGACCTCCAGGAAC |
| Aminopeptidase P membrane-bound | XPNPEP2 | AE100s9 | Intron10 | 0 | AE100p37p38 | XPNPEP2_X10a | CTTCCTTTGACCTCCAGGAAC |
| Aminopeptidase P membrane-bound | XPNPEP2 | AE100s10 | Intron7 | 0 | AE100p25p26 | XPNPEP2_X7a | CCAGCGTGGGCATACATG |
| Aminopeptidase P membrane-bound | XPNPEP2 | AE100s11 | Intron13 | 0 | AE100p49p50 | XPNPEP2_X13a | TAAATGACAGGTCAGGGCTTG |
| Aminopeptidase P membrane-bound | XPNPEP2 | AE100s12 | Intron13 | 0 | AE100p49p50 | XPNPEP2_X13a | TAAATGACAGGTCAGGGCTTG |
| Aminopeptidase P membrane-bound | XPNPEP2 | AE100s13 | Intron13 | 0 | AE100p49p50 | XPNPEP2_X13a | TAAATGACAGGTCAGGGCTTG |
| Aminopeptidase P membrane-bound | XPNPEP2 | AE100s14 | Exon1 | 0 | AE100p1p2 | XPNPEP2_X1a | TAAATGACAGGTCAGGGCTTG |
| Aminopeptidase P membrane-bound | XPNPEP2 | AE100s15 | Exon1 | 0 | AE100p1p2 | XPNPEP2_X1a | TAAATGACAGGTCAGGGCTTG |
| Aminopeptidase P membrane-bound | XPNPEP2 | AE100s16 | Intron8 | 0 | AE100p29p30 | XPNPEP2_X8a | GGCCCATGTCATTAATGAGTAC |
| Aminopeptidase P membrane-bound | XPNPEP2 | AE100s17 | Intron17 | 0 | AE100p65p66 | XPNPEP2_X17a | CCCTCTTCTTAGGCACCACTC |
| Aminopeptidase P membrane-bound | XPNPEP2 | AE100s18 | Intron17 | 0 | AE100p65p66 | XPNPEP2_X17a | CCCTCTTCTTAGGCACCACTC |
| Aminopeptidase P membrane-bound | XPNPEP2 | AE100s19 | Intron15 | 0 | AE100p57p58 | XPNPEP2_X15a | TAGCTGTCTTCTTCCTTTCGC |
| Aminopeptidase P membrane-bound | XPNPEP2 | AE100s20 | Intron21 | 0 | AE100p81p82 | XPNPEP2_X21.f1a | GGACTATGGTGACAGCTGGAG |
| Aminopeptidase P membrane-bound | XPNPEP2 | AE100s21 | Exon21 | 0 | AE100p81p82 | XPNPEP2_X21.f1a | GGACTATGGTGACAGCTGGAG |
| Aminopeptidase P membrane-bound | XPNPEP2 | AE100s22 | Exon21 | 0 | AE100p85p86 | XPNPEP2_X21.f1a | GAGGCTCCAGACTCTCCTGTT |
| Aminopeptidase P membrane-bound | XPNPEP2 | AE100s23 | Exon21 | 0 | AE100p85p86 | XPNPEP2_X21.f1a | GAGGCTCCAGACTCTCCTGTT |
| Bradykinin Receptor B1 | BDKRB1 | AE103s1 | Exon2 | 0 | AE103p13p14 | U48231_X2.f3a | CACTTTGCAAGGATTGTGGAG |
| Bradykinin Receptor B1 | BDKRB1 | AE103s2 | Exon2 | 0 | AE103p5p6 | U48231_X2.f1a | TGGCTCTGTGCCAATAAAACT |
| Bradykinin Receptor B1 | BDKRB1 | AE103s3 | Exon3 | 0 | AE103p17p18 | U48231_X2.f4a | AGGACCAAGGTCTGGGAACT |
| Bradykinin Receptor B1 | BDKRB1 | AE103s4 | Exon1 | 0 | AE103p1p2 | U48231_X1a | GCTGCCAGGAAGATTAAATGA |
| Bradykinin Receptor B1 | BDKRB1 | AE103s5 | Exon3 | 0 | AE103p25p26 | U48231_X2.f6a | ACTTCCCAGACTCAAGGGATC |
| Bradykinin Receptor B2 | BDKRB2 | AE104s1 | Interon1 | 1 | AE104p33p34 | BDKRB2_X1.f1a | CGACTAGGTCCTCACCAGACA |
| Bradykinin Receptor B2 | BDKRB2 | AE104s2 | Interon1 | 1 | AE104p33p34 | BDKRB2_X1.f1a | CGACTAGGTCCTCACCAGACA |
| Bradykinin Receptor B2 | BDKRB2 | AE104s3 | Interon1 | 1 | AE104p39p40 | BDKRB2_X1.f2 | GCAGGCAAATACCACTTTCAA |
| Bradykinin Receptor B2 | BDKRB2 | AE104s4 | Interon1 | 1 | AE104p39p40 | BDKRB2_X1.f2 | GCAGGCAAATACCACTTTCAA |
| Bradykinin Receptor B2 | BDKRB2 | AE104s5 | Interon1 | 1 | AE104p39p40 | BDKRB2_X1.f2 | GCAGGCAAATACCACTTTCAA |
| Bradykinin Receptor B2 | BDKRB2 | AE104s6 | Interon1 | 1 | AE104p39p40 | BDKRB2_X1.f2 | GCAGGCAAATACCACTTTCAA |
| Bradykinin Receptor B2 | BDKRB2 | AE104s7 | Interon2 | 1 | AE104p29p30 | BDKRB2_X2a | GCTCTTTCTGGAAGGTCCACT |
| Bradykinin Receptor B2 | BDKRB2 | AE104s8 | Exon3 | 1 | AE104p25p26 | BDKRB2_X3.f7a | GGTCTCAGCACTGTGATCCTC |
| Bradykinin Receptor B2 | BDKRB2 | AE104s9 | Exon3 | 1 | AE104p25p26 | BDKRB2_X3.f7a | GGTCTCAGCACTGTGATCCTC |
| Bradykinin Receptor B2 | BDKRB2 | AE104s10 | Exon3 | 1 | AE104p25p26 | BDKRB2_X3.f7a | GGTCTCAGCACTGTGATCCTC |
| Bradykinin Receptor B2 | BDKRB2 | AE104s11 | Exon3 | 1 | AE104p9p10 | BDKRB2_X3.f3a | TCTACATGCCAGAAGCCTGTT |
| Bradykinin Receptor B2 | BDKRB2 | AE104s12 | Exon3 | 1 | AE104p9p10 | BDKRB2_X3.f3a | TCTACATGCCAGAAGCCTGTT |
| Bradykinin Receptor B2 | BDKRB2 | AE104s13 | Exon3 | 1 | AE104p9p10 | BDKRB2_X3.f3a | TCTACATGCCAGAAGCCTGTT |
| Bradykinin Receptor B2 | BDKRB2 | AE104s14 | Exon3 | 1 | AE104p21p22 | BDKRB2_X3.f6a | CCTCCAGCTTCTAGCTCAGGT |
| Bradykinin Receptor B2 | BDKRB2 | AE104s15 | 3′Flank | 1 | AE104p3p4 | BDKRB2_X3.f1 | GCTTAATGCTTGGGTGATGAA |
| Bradykinin Receptor B2 | BDKRB2 | AE104s16 | 3′Flank | 1 | AE104p3p4 | BDKRB2_X3.f1 | GCTTAATGCTTGGGTGATGAA |
| Tachykinin Receptor 1 | TACR1 | AE106s1 | Exon1 | 1 | AE106p23p24 | TACR1_X1.f1 | CGTGGTCCTCTATGAGCACTT |
| Tachykinin Receptor 1 | TACR1 | AE106s2 | Exon2 | 1 | AE106p17p18 | TACR1_X2a | GGGTATATGTGAGAAATGCTTGC |
| Tachykinin Receptor 1 | TACR1 | AE106s3 | Interon3 | 1 | AE106p13p14 | TACR1_X3a | CTGGGTTCCAAAGACACTGAA |
| Tachykinin Receptor 1 | TACR1 | AE106s4 | Exon5 | 1 | AE106p1p2 | TACR1_X5.f1a | CTGCAGGAGGCTAATCTGAGA |
| Tachykinin Receptor 1 | TACR1 | AE106s5 | Exon5 | 1 | AE106p1p2 | TACR1_X5.f1a | CTGCAGGAGGCTAATCTGAGA |
| Tachykinin Receptor 1 | TACR1 | AE106s6 | Exon5 | 1 | AE106p1p2 | TACR1_X5.f1a | CTGCAGGAGGCTAATCTGAGA |
| Tachykinin Receptor 1 | TACR1 | AE106s7 | Exon5 | 1 | AE106p5p6 | TACR1_X5.f2a | ACCCATACTGACCCTTTTTGC |
| C1 Esterase Inhibitor | C1NH | AE105s1 | Interon4 | 0 | AE105p17p18 | C1NH_X4a | AATACCCTCCATTCCAGCCT |
| C1 Esterase Inhibitor | C1NH | AE105s2 | Interon6 | 0 | AE105p25p26 | C1NH_X6a | GTCTTCCCATTCTGGGTCCT |
| C1 Esterase Inhibitor | C1NH | AE105s3 | Exon7 | 0 | AE105p29p30 | C1NH_X7a | CACTGTTCACCCAGCTGGTAT |
| C1 Esterase Inhibitor | C1NH | AE105s4 | Exon3 | 0 | AE105p9p10 | C1NH_X3.f1a | AGATTGCTCATCTGCTGCACT |
| C1 Esterase Inhibitor | C1NH | AE105s5 | Exon3 | 0 | AE105p13p14 | C1NH_X3.f2a | TTCAGCCACCAAAATAACAGC |
| C1 Esterase Inhibitor | C1NH | AE105s6 | Exon8 | 0 | AE105p33p34 | C1NH_X8.f1a | TTCAGCCACCAAAATAACAGC |
| C1Kallikrein 1 (renal/pancreas/salivary) | KLK1 | AE107s1 | Exon4 | 0 | AE107p13p14 | KLK1_X4a | GACTACAGCCACGACCTCATG |
| C1Kallikrein 1 (renal/pancreas/salivary) | KLK1 | AE107s2 | Interon4 | 0 | AE107p13p14 | KLK1_X4a | GACTACAGCCACGACCTCATG |
| C1Kallikrein 1 (renal/pancreas/salivary) | KLK1 | AE107s3 | Exon3 | 0 | AE107p13p14 | KLK1_X4a | GACTACAGCCACGACCTCATG |
| C1Kallikrein 1 (renal/pancreas/salivary) | KLK1 | AE107s4 | Interon4 | 0 | AE107p13p14 | KLK1_X4a | GACTACAGCCACGACCTCATG |
| C1Kallikrein 1 (renal/pancreas/salivary) | KLK1 | AE107s5 | 3′Flank | 0 | AE107p17p18 | KLK1_X5a | GCTCCCCAGGCAGAACTT |
| C1Kallikrein 1 (renal/pancreas/salivary) | KLK1 | AE107s6 | 3′Flank | 0 | AE107p17p18 | KLK1_X5a | GCTCCCCAGGCAGAACTT |
| Bradykinin Receptor B1 | BDKRB1 | AE103s6 | Exon3 | 0 | AE103p9p10 | U48231_X2.f2a | GCCTCTGATCTGGTGTTTGCT |
| Bradykinin Receptor B1 | BDKRB1 | AE103s7 | Exon3 | 0 | AE103p9p10 | U48231_X2.f2a | GCCTCTGATCTGGTGTTTGTC |
| Bradykinin Receptor B1 | BDKRB1 | AE103s8 | Exon3 | 0 | AE103p9p10 | U48231_X2.f2a | GCCTCTGATCTGGTGTTTGTC |
| Bradykinin Receptor B1 | BDKRB1 | AE103s9 | Exon3 | 0 | AE103p13p14 | U48231_X2.f3a | CACTTTGCAAGGATTGTGGAG |
| Bradykinin Receptor B2 | BDKRB2 | AE104s18 | Interon or Exon | 1 | AE104p65p66 | BDKRB2_X3-5a | GGCAGGGCAGGAATTAGTCT |
| Bradykinin Receptor B2 | BDKRB2 | AE104s19 | Exon2 | 1 | AE104p65p66 | BDKRB2_X3-5a | GGCAGGGCAGGAATTAGTCT |
| Bradykinin Receptor B2 | BDKRB2 | AE104s20 | 5′Flank | 1 | AE104p89p90 | BDKRB2_X1-3a | CTGGGATTTCTTTGTATGCCA |
| Bradykinin Receptor B2 | BDKRB2 | AE104s21 | 5′Flank | 1 | AE104p89p90 | BDKRB2_X1-3a | CTGGGATTTCTTTGTATGCCA |
| Bradykinin Receptor B2 | BDKRB2 | AE104s22 | 5′Flank | 1 | AE104p87p88 | BDKRB2_X1-2 | ACCTTCGCTCTCCGCTCT |
| Bradykinin Receptor B2 | BDKRB2 | AE104s23 | 5′Flank | 1 | AE104p81p82 | BDKRB2_X1-1a | ACGACCACAGGGAAACTTCTC |
| Bradykinin Receptor B2 | BDKRB2 | AE104s24 | Exon3 | 1 | AE104p65p66 | BDKRB2_X3-5a | GGCAGGGCAGGAAATTAGTCT |
| Bradykinin Receptor B2 | BDKRB2 | AE104s25 | Exon3 | 1 | AE104p65p66 | BDKRB2_X3-5a | GGCAGGGCAGGAATTAGTCT |
| Bradykinin Receptor B2 | BDKRB2 | AE104s26 | Exon3 | 1 | AE104p61p62 | BDKRB2_X3-4a | GACCTCCTTGTCCATCAGTGA |
| Bradykinin Receptor B2 | BDKRB2 | AE104s27 | Exon3 | 1 | AE104p57p58 | BDKRB2_X3-3a | TCCCAGTTACGTCTGCGTAAT |
| Bradykinin Receptor B2 | BDKRB2 | AE104s28 | Exon3 | 1 | AE104p53p54 | BDKRB2_X3-2a | GCCACCTTCCAATAAACCATT |
| Bradykinin Receptor B2 | BDKRB2 | AE104s29 | Exon3 | 1 | AE104p53p54 | BDKRB2_X3-2a | GCCACCTTCCAATAAACCATT |
| Anglotensin Converting Enzyme 2 | ACE2 | AE109s1 | Intron14 | 1 | AE109p25p26 | ACE2_X14a | TTAAAAACCCAAAGCCAAAGG |
| Anglotensin Converting Enzyme 2 | ACE2 | AE109s2 | Intron12 | 1 | AE109p29p30 | ACE2_X13a | CACCATAGCAGAGAAAGAAGCA |
| Anglotensin Converting Enzyme 2 | ACE2 | AE109s3 | Intron13 | 1 | AE109p29p30 | ACE2_X13a | CACCATAGCAGAGAAAGAAGCA |
| Anglotensin Converting Enzyme 2 | ACE2 | AE109s4 | Intron3 | 1 | AE109p69p70 | ACE2_X3a | GTAAGGTTGGCAGACATCAGG |
| Anglotensin Converting Enzyme 2 | ACE2 | AE109s5 | Intron2 | 1 | AE109p69p70 | ACE2_X3a | GTAAGGTTGGCAGACATCAGG |
| Anglotensin Converting Enzyme 2 | ACE2 | AE109s6 | Intron16 | 1 | AE109p17p18 | ACE2_X16a | CTGTGGGATCCTTCTGGAATT |
| Anglotensin Converting Enzyme 2 | ACE2 | AE109s7 | Exon16 | 1 | AE109p17p18 | ACE2_X16a | CTGTGGGATCCTTCTGGAATT |
| Protease Inhibitor 4 | PI4 | AE110s1 | Intron1 | 0 | AE110p21p22 | PI4_X2a | GGACATCTTGATGGGCTCATA |
| Protease Inhibitor 4 | PI4 | AE110s2 | Exon2 | 0 | AE110p21p22 | PI4_X2a | GGACATCTTGATGGGCTCATA |
| Protease Inhibitor 4 | PI4 | AE110s3 | Intron2 | 0 | AE110p25p26 | PI4_X3a | GCCTGGGTACAAAGGAACCT |
| Protease Inhibitor 4 | PI4 | AE110s4 | Intron2 | 0 | AE110p25p26 | PI4_X3a | GCCTGGGTACAAAGGAACCT |
| Protease Inhibitor 4 | PI4 | AE110s5 | Exon1 | 0 | AE110p17p18 | PI4_X1.f5a | AAGAACATCTTTTTCTCCCCG |
| Protease Inhibitor 4 | PI4 | AE110s6 | 5′Flank | 0 | AE110p5p6 | PI4_X1.f2a | TAGAAGCTTTTTGGCCTGACA |
| Protease Inhibitor 4 | PI4 | AE110s7 | 5′Flank | 0 | AE110p5p6 | PI4_X1.f2a | TAGAAGCTTTTTGGCCTGACA |
| Protease Inhibitor 4 | PI4 | AE110s8 | 5′Flank | 0 | AE110p1p2 | PI4_X1.f1a | ATGGTGAGACCCCGACTCTAT |
| Protease Inhibitor 4 | PI4 | AE110s9 | 5′Flank | 0 | AE110p1p2 | PI4_X1.f1a | ATGGTGAGACCCCGACTCTAT |
| Aminopeptidase P (membrane-bound) | XPNPEP2 | AE100s24 | Intron11 | 0 | AE100p45p46 | XPNPEP2_X12a | TTTTCAAAGCTCCACATCCTG |
| Aminopeptidase P (membrane-bound) | XPNPEP2 | AE100s25 | Intron13 | 0 | AE100p49p50 | XPNPEP2_X13a | TAAATGACAGGTCAGGGCTTG |
| Aminopeptidase P (membrane-bound) | XPNPEP2 | AE100s26 | Intron13 | 0 | AE100p49p50 | XPNPEP2_X13a | TAAATGACAGGTCAGGGCTTG |
| Aminopeptidase P (membrane-bound) | XPNPEP2 | AE100s27 | Intron7 | 0 | AE100p29p30 | XPNPEP2_X8a | GGCCCATGTCATTAATGAGTAC |
| Aminopeptidase P (membrane-bound) | XPNPEP2 | AE100s28 | Exon21 | 0 | AE100p93p94 | XPNPEP2_X21.f4a | GAACTTTCCAAAGTGCAGCC |
| Aminopeptidase P (membrane-bound) | XPNPEP2 | AE100s29 | Exon21 | 0 | AE100p93p94 | XPNPEP2_X21.f4a | GAACTTTCCAAAGTGCAGCC |
| Aminopeptidase P (membrane-bound) | XPNPEP2 | AE100s30 | Exon6 | 0 | AE100p17p18 | XPNPEP2_X5a | GAGAATCTCTTTCCAGAGGCC |
| Bradykinin Receptor B1 | BDKRB1 | AE103s10 | Exon3 | 0 | AE103p25p26 | U48231_X2.f6a | ACTTCCCAGACTCAAGGGATC |
| Bradykinin Receptor B1 | BDKRB1 | AE103s11 | Exon3 | 0 | AE103p25p26 | U48231_X2.f6a | ACTTCCCAGACTCAAGGGATC |
| Bradykinin Receptor B1 | BDKRB1 | AE103s12 | Exon3 | 0 | AE103p25p26 | U48231_X2.f6a | ACTTCCCAGACTCAAGGGATC |
| Bradykinin Receptor B1 | BDKRB1 | AE103s13 | Exon3 | 0 | AE103p25p26 | U48231_X2.f6a | ACTTCCCAGACTCAAGGGATC |
| Bradykinin Receptor B1 | BDKRB1 | AE103s14 | Exon3 | 0 | AE103p25p26 | U48231_X2.f6a | ACTTCCCAGACTCAAGGGATC |
| Bradykinin Receptor B2 | BDKRB2 | AE104s30 | Exon3 | 1 | AE104p53p54 | BDKRB2_X3.f2a | GCCACCTTCCAATAAACCATT |
| Bradykinin Receptor B2 | BDKRB2 | AE104s31 | Exon3 | 1 | AE104p81p82 | BDKRB2_X1.f1a | ACGACCACAGGGAAACTTCTC |
| Bradykinin Receptor B2 | BDKRB2 | AE104s32 | Interon1 | 1 | AE104p81p82 | BDKRB2_X1.f1a | ACGACCACAGGGAAACTTCTC |
| Bradykinin Receptor B2 | BDKRB2 | AE104s33 | Interon1 | 1 | AE104p81p82 | BDKRB2_X1.f1a | ACGACCACAGGGAAACTTCTC |
| Bradykinin Receptor B2 | BDKRB2 | AE104s34 | Exon3 | 1 | AE104p73p74 | BDKRB2_X3.f7a | TCGCTGTACTCCTTCATGGTC |
| Bradykinin Receptor B2 | BDKRB2 | AE104s35 | Exon3 | 1 | AE104p73p74 | BDKRB2_X3.f7a | TCGCTGTACTCCTTCATGGTC |
| Bradykinin Receptor B2 | BDKRB2 | AE104s36 | Exon3 | 1 | AE104p73p74 | BDKRB2_X3.f7a | TCGCTGTACTCCTTCATGGTC |
| Protease Inhibitor 4 | PI42 | AE110s10 | Exon4 | 0 | AE110p29p30 | PI4_X4a | ATTTCTGGCTCTCGCAGTCTT |
| Protease Inhibitor 4 | PI42 | AE110s11 | Exon1 | 0 | AE110p1p2 | PI4_X1.f1a | ATGGTGAGACCCCGACTCTAT |
| Protease Inhibitor 4 | PI42 | AE110s12 | 5′Flank | 0 | AE110p1p2 | PI4_X1.f1a | ATGGTGAGACCCCGACTCTAT |
| Tachykinin Receptor 1 | TACR1 | AE106s8 | Interon4 | 1 | AE106p9p10 | TACR1_X4a | AAGTTAGCTGCAGTCCCCACT |
| Tachykinin Receptor 1 | TACR1 | AE106s9 | Interon3 | 1 | AE106p13p14 | TACR1_X3a | CTGGGTTCCAAAGACACTGAA |
| Anglotensin Converting Enzyme 2 | ACE2 | AE109s8 | Interon13 | 1 | AE109p29p30 | ACE2_X13a | CACCATAGCAGAGAAAGAAGCA |
| Anglotensin Converting Enzyme 2 | ACE2 | AE109s9 | Interon6 | 1 | AE109p57p58 | ACE2_Xa6 | CAAAATGCGATTTCTACAATGTT |

| PCR Left primer | | PCR Right primer |
|---|---|---|
| (SEQ ID NO:) | PCR Right primer | (SEQ ID NO:) |
| 297 | TATTCACTACCTGGGGTTGGG | 360 |
| 298 | TCTCTACTTCCCTCCCTTTGC | 361 |
| 299 | ATAGGATGAGGCTCAGCTTGG | 362 |
| 300 | ATAGGATGAGGCTCAGCTTGG | 363 |
| 301 | AACAGAAAAAGAGACTCGGGC | 364 |
| 302 | GGCCCTGAAATCTGCATTT | 365 |
| 303 | GGCCCTGAAATCTGCATTT | 366 |
| 304 | CCTGTTTCCTCTTCTGGCTCT | 367 |
| 305 | CCTGTTTCCTCTTCTGGCTCT | 368 |
| 306 | GGCCCTGAAATCTGCATTT | 369 |
| 307 | CAGCTCTCAGGCCTTTTCATT | 370 |
| 308 | CAGCTCTCAGGCCTTTTCATT | 371 |
| 309 | CAGCTCTCAGGCCTTTTCATT | 372 |
| 310 | AACAGAAAAAGAGACTCGGGC | 373 |
| 311 | AACAGAAAAAGAGACTCGGGC | 374 |
| 312 | TCAGGGCTACCTTTTGTCCTT | 375 |
| 313 | CTGCTGGCATTCCTCACTTAC | 376 |
| 314 | CTGCTGGCATTCCTCACTTAC | 377 |
| 315 | ATAGGATGAGGCTCAGCTTGG | 378 |
| 316 | CAAGAAGCCCTGTGTTCCTG | 379 |
| 317 | CAAGAAGCCCTGTGTTCCTG | 380 |
| 318 | TTAGGAATGATGGGTTCACATG | 381 |
| 319 | TTAGGAATGATGGGTTCACATG | 382 |
| 320 | AAGAAAGCCAAGCTTCTTGGT | 383 |
| 321 | CACCACCAGGAAGATGCTG | 384 |
| 322 | TGGAGGCCAGAAATCCTAAAT | 385 |
| 323 | ATCTCAGTACTTTGGGAGGCC | 386 |
| 324 | CGTGGTGTGTTCATGCAATT | 387 |
| 325 | CTCAGTGTCCAGGGAAATGC | 388 |
| 326 | CTCAGTGTCCAGGGAAATGC | 389 |
| 327 | CCGAGGTTCTCTGGAGAAAAA | 390 |
| 328 | CCGAGGTTCTCTGGAGAAAAA | 391 |
| 329 | CCGAGGTTCTCTGGAGAAAAA | 392 |
| 330 | CCGAGGTTCTCTGGAGAAAAA | 393 |
| 331 | ATACCAACAGCTTCCCCAGTT | 394 |
| 332 | CAAAGACTCAAGTGGGAACGA | 395 |
| 333 | CAAAGACTCAAGTGGGAACGA | 396 |
| 334 | CAAAGACTCAAGTGGGAACGA | 397 |
| 335 | CCACTCTCCTCTGCCTCAGTA | 398 |
| 336 | CCACTCTCCTCTGCCTCAGTA | 399 |
| 337 | CCACTCTCCTCTGCCTCAGTA | 400 |
| 338 | GCAGAATCAGTATTGGGAGCC | 401 |
| 339 | CTAGAATCATAGGCGCAGCAG | 402 |
| 340 | CTAGAATCATAGGCGCAGCAG | 403 |
| 341 | CATCTCCACTAACACCTCGGA | 404 |
| 342 | TCATCAGGAATCAAAGGGTTTC | 405 |
| 343 | TATGCAGGTGACAAGTCTCCC | 406 |
| 344 | TCCAACTGCTCTTCACGAAGT | 407 |
| 345 | TCCAACTGCTCTTCACGAAGT | 408 |
| 346 | TCCAACTGCTCTTCACGAAGT | 409 |
| 347 | TAACAAGCTGATGCAGTGGTG | 410 |
| 348 | TGGAGTGACCTAATGCTCCTG | 411 |
| 349 | GGTGGAAATACAGATGGAAGGA | 412 |
| 350 | ACATCTTAGGGATCCCCCTTT | 413 |
| 351 | AGTAGTGGGCTGGGTAGGAGA | 414 |
| 352 | TGGATTGGTGACTCTTATGGG | 415 |
| 353 | GTGGATAGCGGACACCTGAG | 416 |
| 354 | GCTCTCAGAAGCCAGTTCAGA | 417 |
| 355 | GCTCTCAGAAGCCAGTTCAGA | 418 |
| 356 | GCTCTCAGAAGCCAGTTCAGA | 419 |
| 357 | GCTCTCAGAAGCCAGTTCAGA | 420 |
| 358 | CTGCTGGTGACCTCAGACTTC | 421 |
| 359 | CTGCTGGTGACCTCAGACTTC | 422 |
| 707 | CTGTGGTCTTGCTATCCTTCG | 739 |
| 708 | CTGTGGTCTTGCTATCCTTCG | 740 |
| 709 | CTGTGGTCTTGCTATCCTTCG | 741 |
| 710 | AAGAAAGCCAAGCTTCTTGGT | 742 |
| 711 | AGATCCAGACAGAGAGGAGGG | 743 |
| 712 | AGATCCAGACAGAGAGGAGGG | 744 |
| 713 | AGAGCCTACAGCCAGTTCACA | 745 |
| 714 | AGAGCCTACAGCCAGTTCACA | 746 |
| 715 | AGAAACCTCCGCCATACATCT | 747 |
| 716 | GAGGACGTTTTTGCCGTC | 748 |
| 717 | AGATCCAGACAGAGAGGAGGG | 749 |
| 718 | AGATCCAGACAGAGAGGAGGG | 750 |
| 719 | GGGCTGCTGTGAATTTGTGTA | 751 |
| 720 | GCTGAGTGCACAAGTGAGTTG | 752 |
| 721 | GGGTGATATGGACAGCAGAAG | 753 |
| 722 | GGGTGATATGGACAGCAGAAG | 754 |
| 723 | TTTCTCGTTTTCCAAAAGCCT | 755 |
| 724 | GCCAAGTCAAAGAGAAGAAACC | 756 |
| 725 | GCCAAGTCAAAGAGAAGAAACC | 757 |
| 726 | AAAAATCATGTGGTCAAAAGGA | 758 |
| 727 | AAAAATCATGTGGTCAAAAGGA | 759 |
| 728 | CAATTACATCCTCTCATTGTTTGC | 760 |
| 729 | CAATTACATCCTCTCATTGTTTGC | 761 |
| 730 | TGGGGCACTGTCTTTCATTAG | 762 |
| 731 | TGGGGCACTGTCTTTCATTAG | 763 |
| 732 | CCGAGTTCTCTAGGGATTGCT | 764 |
| 733 | CCGAGTTCTCTAGGGATTGCT | 765 |
| 734 | CAACAAATTAGTGGGTTGGAGG | 766 |
| 735 | TGAGCTCTGCACAGCACTAGA | 767 |
| 736 | TGAGCTCTGCACAGCACTAGA | 768 |
| 737 | TGTTACCCCGTACAGACAAGG | 769 |
| 738 | TGTTACCCCGTACAGACAAGG | 770 |
| 962 | TCGAGTTGTCCTGCTTTCAG | 988 |
| 963 | CAGCTCTCAGGCCTTTTCATT | 989 |
| 964 | CAGCTCTCAGGCCTTTTCATT | 990 |
| 965 | TCAGGGCTACCTTTTGTCCTT | 991 |
| 966 | ACACATACTCTCAAGCCCACG | 992 |
| 967 | ACACATACTCTCAAGCCCACG | 993 |
| 968 | TGCACGCTCTCACCTATACCT | 994 |
| 969 | CGTGGTGTGTTCATGCAATT | 995 |
| 970 | CGTGGTGTGTTCATGCAATT | 996 |
| 971 | CGTGGTGTGTTCATGCAATT | 997 |
| 972 | CGTGGTGTGTTCATGCAATT | 998 |
| 973 | CGTGGTGTGTTCATGCAATT | 999 |
| 974 | GGGTGATATGGACAGCAGAAG | 1000 |
| 975 | GAGGACGTTTTTGCCGTC | 1001 |
| 976 | GAGGACGTTTTTGCCGTC | 1002 |
| 977 | GAGGACGTTTTTGCCGTC | 1003 |
| 978 | TTTTTGTCCTTCCCTTGTGAC | 1004 |
| 979 | TTTTTGTCCTTCCCTTGTGAC | 1005 |
| 980 | TTTTTGTCCTTCCCTTGTGAC | 1006 |
| 981 | CCTTTCCAGAGGCAGAAACTT | 1007 |
| 982 | TGTTACCCCGTACAGACAAGG | 1008 |
| 983 | TGTTACCCCGTACAGACAAGG | 1009 |
| 984 | GCTTCATCCCATACTGTGCA | 1010 |
| 985 | TATGCAGGTGACAAGTCTCCC | 1011 |
| 986 | GCCAAGTCAAAGAGAAGAAACC | 1012 |
| 987 | TGGAATGGAAATTAGAATTGGTT | 1013 |

[1478] TABLE IX

| GENE_DESCRIPTION | HONC_ID | SNP_ID | EXON | REVCOMP | Target_Name | Forward sequencing primer |
|---|---|---|---|---|---|---|
| Aminopeptidase P | XPNPEP2 | AE100s1 | Exon20 | 0 | XPNPEP2_X20a | AGTTCCTCCTCCTCCCTCACT |
| (membrane-bound) | | | | | | |
| Aminopeptidase P | XPNPEP2 | AE100s2 | Intron3 | 0 | XPNPEP2_X3a | CAGTAACATCAGTTGCCACCC |
| (membrane-bound) | | | | | | |
| Aminopeptidase P | XPNPEP2 | AE100s3 | Intron15 | 0 | XPNPEP2_X15a | CACTTGTGGAAAGCACACAGA |
| (membrane-bound) | | | | | | |
| Aminopeptidase P | XPNPEP2 | AE100s4 | Intron15 | 0 | XPNPEP2_X15a | CACTTGTGGAAAGCACACAGA |
| (membrane-bound) | | | | | | |
| Aminopeptidase P | XPNPEP2 | AE100s5 | Intron1 | 0 | XPNPEP2_X1a | CCTCTGTCTCTGAGATCTTTGGA |
| (membrane-bound) | | | | | | |
| Aminopeptidase P | XPNPEP2 | AE100s6 | Intron7 | 0 | XPNPEP2_X7a | GCAAAGGGAACCAGGACTAAC |
| (membrane-bound) | | | | | | |
| Aminopeptidase P | XPNPEP2 | AE100s7 | Intron7 | 0 | XPNPEP2_X7a | GCAAAGGGAACCAGGACTAAC |
| (membrane-bound) | | | | | | |
| Aminopeptidase P | XPNPEP2 | AE100s8 | Intron10 | 0 | XPNPEP2_X10a | CTTTGCATCCTTAGCAGATGC |
| (membrane-bound) | | | | | | |
| Aminopeptidase P | XPNPEP2 | AE100s9 | Intron10 | 0 | XPNPEP2_X10a | CTTTGCATCCTTAGCAGATGC |
| (membrane-bound) | | | | | | |
| Aminopeptidase P | XPNPEP2 | AE100s10 | Intron7 | 0 | XPNPEP2_X7a | GCAAAGGGAACCAGGACTAAC |
| (membrane-bound) | | | | | | |
| Aminopeptidase P | XPNPEP2 | AE100s11 | Intron13 | 0 | XPNPEP2_X13a | AGTTGAGAGGTAGAGGCAGCC |
| (membrane-bound) | | | | | | |
| Aminopeptidase P | XPNPEP2 | AE100s12 | Intron13 | 0 | XPNPEP2_X13a | AGTTGAGAGGTAGAGGCAGCC |
| (membrane-bound) | | | | | | |
| Aminopeptidase P | XPNPEP2 | AE100s13 | Intron13 | 0 | XPNPEP2_X13a | AGTTGAGAGGTAGAGGCAGCC |
| (membrane-bound) | | | | | | |
| Aminopeptidase P | XPNPEP2 | AE100s14 | Exon1 | 0 | XPNPEP2_X1a | CCTCTGTCTCTGAGATCTTTGGA |
| (membrane-bound) | | | | | | |
| Aminopeptidase P | XPNPEP2 | AE100s15 | Exon1 | 0 | XPNPEP2_X1a | CCTCTGTCTCTGAGATCTTTGGA |
| (membrane-bound) | | | | | | |
| Aminopeptidase P | XPNPEP2 | AE100s16 | Intron8 | 0 | XPNPEP2_X8a | AGGGTTTCGCTGCTTTTTAAG |
| (membrane-bound) | | | | | | |
| Aminopeptidase P | XPNPEP2 | AE100s17 | Intron17 | 0 | XPNPEP2_X17a | CAAGGTGGACAGTCTTCGGTA |
| (membrane-bound) | | | | | | |
| Aminopeptidase P | XPNPEP2 | AE100s18 | Intron17 | 0 | XPNPEP2_X17a | CAAGGTGGACAGTCTTCGGTA |
| (membrane-bound) | | | | | | |
| Aminopeptidase P | XPNPEP2 | AE100s19 | Intron15 | 0 | XPNPEP2_X15a | CACTTGTGGAAAGCACACAGA |
| (membrane-bound) | | | | | | |
| Aminopeptidase P | XPNPEP2 | AE100s20 | Intron21 | 0 | XPNPEP2_X21.11a | CAAGACTTCACCTCTTGGCAG |
| (membrane-bound) | | | | | | |
| Aminopeptidase P | XPNPEP2 | AE100s21 | Exon21 | 0 | XPNPEP2_X21.11a | CAAGACTTCACCTCTTGGCAG |
| (membrane-bound) | | | | | | |
| Aminopeptidase P | XPNPEP2 | AE100s22 | Exon21 | 0 | XPNPEP2_X21.12a | ACTGAACATACCCCAAGAGCC |
| (membrane-bound) | | | | | | |
| Aminopeptidase P | XPNPEP2 | AE100s23 | Exon21 | 0 | XPNPEP2_X21.12a | ACTGAACATACCCCAAGAGCC |
| (membrane-bound) | | | | | | |
| Bradykinin Receptor B1 | BDKRB1 | AE103s1 | Exon2 | 0 | U48231_X2.13a | TCTGGGTTTCCTTCCTACCACT |
| Bradykinin Receptor B1 | BDKRB1 | AE103s2 | Exon2 | 0 | U48231_X2.11a | GACAGGTTGGTTTGGCTCATA |
| Bradykinin Receptor B1 | BDKRB1 | AE103s3 | Exon3 | 0 | U48231_X2.14a | CACCCCTAAAAGTCTTGCTCC |
| Bradykinin Receptor B1 | BDKRB1 | AE103s4 | Exon1 | 0 | U48231_X1a | GCCTGGAACACAGACCATTAA |
| Bradykinin Receptor B1 | BDKRB1 | AE103s5 | Exon3 | 0 | U48231_X2.16a | CTCAGCCTCCTGTAGCTGAGA |
| Bradykinin Receptor B2 | BDKRB2 | AE104s1 | Intron1 | 1 | BDKRB2_X1.11a | GCACCGAGAGCAATAAATGTC |
| Bradykinin Receptor B2 | BDKRB2 | AE104s2 | Intron1 | 1 | BDKRB2_X1.11a | GCACCGAGAGCAATAAATGTC |
| Bradykinin Receptor B2 | BDKRB2 | AE104s3 | Intron1 | 1 | BDKRB2_X1.12 | GCAGGCAAATACCACTTTCAA |
| Bradykinin Receptor B2 | BDKRB2 | AE104s4 | Intron1 | 1 | BDKRB2_X1.12 | GCAGGCAAATACCACTTTCAA |
| Bradykinin Receptor B2 | BDKRB2 | AE104s5 | Intron1 | 1 | BDKRB2_X1.12 | GCAGGCAAATACCACTTTCAA |
| Bradykinin Receptor B2 | BDKRB2 | AE104s6 | Intron1 | 1 | BDKRB2_X1.12 | GCAGGCAAATACCACTTTCAA |
| Bradykinin Receptor B2 | BDKRB2 | AE104s7 | Intron2 | 1 | BDKRB2_X2a | GAGCTGAACTACGAGTCACGG |
| Bradykinin Receptor B2 | BDKRB2 | AE104s8 | Exon3 | 1 | BDKRB2_X3.17a | ATCTTCCTCTGCCTCATCACA |
| Bradykinin Receptor B2 | BDKRB2 | AE104s9 | Exon3 | 1 | BDKRB2_X3.17a | ATCTTCCTCTGCCTCATCACA |
| Bradykinin Receptor B2 | BDKRB2 | AE104s10 | Exon3 | 1 | BDKRB2_X3.17a | ATCTTCCTCTGCCTCATCACA |
| Bradykinin Receptor B2 | BDKRB2 | AE104s11 | Exon3 | 1 | BDKRB2_X3.13a | AAAGGCTTCTGAGTGTGCAAG |
| Bradykinin Receptor B2 | BDKRB2 | AE104s12 | Exon3 | 1 | BDKRB2_X3.13a | AAAGGCTTCTGAGTGTGCAAG |
| Bradykinin Receptor B2 | BDKRB2 | AE104s13 | Exon3 | 1 | BDKRB2_X3.13a | AAAGGCTTCTGAGTGTGCAAG |
| Bradykinin Receptor B2 | BDKRB2 | AE104s14 | Exon3 | 1 | BDKRB2_X3.16a | CAGGTTCTAGCCCTTCTTGGT |
| Bradykinin Receptor B2 | BDKRB2 | AE104s16 | 3′Flank | 1 | BDKRB2_X3.11 | TGGGAGTATGAAACAAGTGGC |
| Bradykinin Receptor B2 | BDKRB2 | AE104s17 | 3′Flank | 1 | BDKRB2_X3.11 | TGGGAGTATGAAACAAGTGGC |
| Tachykinin Receptor 1 | TACR1 | AE106s1 | Exon1 | 1 | TACR1_X1.11 | TTGTGGGCTAAGATGATCCAC |
| Tachykinin Receptor 1 | TACR1 | AE106s2 | Exon2 | 1 | TACR1_X2a | GAAAGAAAGAGCAAGAAGGGG |
| Tachykinin Receptor 1 | TACR1 | AE106s3 | Intron3 | 1 | TACR1_X3a | CCTCTCCTCCTCTCTGTTGCT |
| Tachykinin Receptor 1 | TACR1 | AE106s4 | Exon5 | 1 | TACR1_X5.11a | GGCTCCAGGAAAATGAGTCTT |
| Tachykinin Receptor 1 | TACR1 | AE106s5 | Exon5 | 1 | TACR1_X5.11a | GGCTCCAGGAAAATGAGTCTT |
| Tachykinin Receptor 1 | TACR1 | AE106s6 | Exon5 | 1 | TACR1_X5.11a | GGCTCCAGGAAAATGAGTCTT |
| Tachykinin Receptor 1 | TACR1 | AE106s7 | Exon5 | 1 | TACR1_X5.12a | ATGGTTCCAGATGAAGGGAAT |
| C1 Esterase Inhibitor | C1NH | AE105s1 | Intron4 | 0 | C1NH_X4a | CCGACTCATCCTGCAAGTATC |
| C1 Esterase Inhibitor | C1NH | AE105s2 | Intron6 | 0 | C1NH_X6a | CCCCAAGTTCTACAATCGGAT |
| C1 Esterase Inhibitor | C1NH | AE105s3 | Exon7 | 0 | C1NH_X7a | AAGCCTGGAAGCTTAGGTCTG |
| C1 Esterase Inhibitor | C1NH | AE105s4 | Exon3 | 0 | C1NH_X3.11a | TTTCCACATCCACACCTTCTC |
| C1 Esterase Inhibitor | C1NH | AE105s5 | Exon3 | 0 | C1NH_X3.12a | ATACCACTGATGAACCCACCA |
| C1 Esterase Inhibitor | C1NH | AE105s6 | Exon8 | 0 | C1NH_X8.11a | CTCCATCAGCTGAGGGTATCA |
| Kallikrein 1 | KLK1 | AE107s1 | Exon4 | 0 | KLK1_X4a | CCTGACAGAGCCTGCTGATAC |
| (renal/pancreas/salivary) | | | | | | |
| Kallikrein 1 | KLK1 | AE107s2 | Intron4 | 0 | KLK1_X4a | CCTGACAGAGCCTGCTGATAC |
| (renal/pancreas/salivary) | | | | | | |
| Kallikrein 1 | KLK1 | AE107s3 | Exon3 | 0 | KLK1_X4a | CCTGACAGAGCCTGCTGATAC |
| (renal/pancreas/salivary) | | | | | | |
| Kallikrein 1 | KLK1 | AE107s4 | Intron4 | 0 | KLK1_X4a | CCTGACAGAGCCTGCTGATAC |
| (renal/pancreas/salivary) | | | | | | |
| Kallikrein 1 | KLK1 | AE107s5 | 3′Flank | 0 | KLK1_X5a | CCCCGTAGACCTTTCTCACTC |
| (renal/pancreas/salivary) | | | | | | |
| Kallikrein 1 | KLK1 | AE107s6 | 3′Flank | 0 | KLK1_X5a | CCCCGTAGACCTTTCTCACTC |
| (renal/pancreas/salivary) | | | | | | |
| Bradykinin Receptor B1 | BDKRB1 | AE103s6 | Exon3 | 0 | U48231_X2.12a | CCCTTCTGGGCAGAGAATATC |
| Bradykinin Receptor B1 | BDKRB1 | AE103s7 | Exon3 | 0 | U48231_X2.12a | CCCTTCTGGGCAGAGAATATC |
| Bradykinin Receptor B1 | BDKRB1 | AE103s8 | Exon3 | 0 | U48231_X2.12a | CCCTTCTGGGCAGAGAATATC |
| Bradykinin Receptor B1 | BDKRB1 | AE103s9 | Exon3 | 0 | U48231_X2.13a | TCTGGGTTTCCTCCTACCACT |
| Bradykinin Receptor B2 | BDKRB2 | AE104s18 | tron1 or Exo | 1 | BDKRB2_X3-5a | GGTGTTTTACCGGAGACATCA |
| Bradykinin Receptor B2 | BDKRB2 | AE104s19 | Exon2 | 1 | BDKRB2_X3-5a | GGTGTTTTACCGGAGACATCA |
| Bradykinin Receptor B2 | BDKRB2 | AE104s20 | 5′Flank | 1 | BDKRB2_X1-3a | CAGAAGCTGTCCTGTTTCCTG |
| Bradykinin Receptor B2 | BDKRB2 | AE104s21 | 5′Flank | 1 | BDKRB2_X1-3a | CAGAAGCTGTCCTGTTTCCTG |
| Bradykinin Receptor B2 | BDKRB2 | AE104s22 | 5′Flank | 1 | BDKRB2_X1-2 | ACCTTCGCTCTCCGCTCT |
| Bradykinin Receptor B2 | BDKRB2 | AE104s23 | 5′Flank | 1 | BDKRB2_X1-1a | CTCTGTGCTGGGACAGTTTGT |
| Bradykinin Receptor B2 | BDKRB2 | AE104s24 | Exon3 | 1 | BDKRB2_X3-5a | GGTGTTTTACCGGAGACATCA |
| Bradykinin Receptor B2 | BDKRB2 | AE104s25 | Exon3 | 1 | BDKRB2_X3-5a | GGTGTTTTACCGGAGACATCA |
| Bradykinin Receptor B2 | BDKRB2 | AE104s26 | Exon3 | 1 | BDKRB2_X3-4a | AATCCTGGTCTCCAGGTTGTT |
| Bradykinin Receptor B2 | BDKRB2 | AE104s27 | Exon3 | 1 | BDKRB2_X3-3a | ACGTAGCACCCTTTGCTTTTC |
| Bradykinin Receptor B2 | BDKRB2 | AE104s28 | Exon3 | 1 | BDKRB2_X3-2a | TTGCTGAGACAGGAACAGTCC |
| Bradykinin Receptor B2 | BDKRB2 | AE104s29 | Exon3 | 1 | BDKRB2_X3-2a | TTGCTGAGACAGGAACAGTCC |
| Angiotensin Converting | ACE2 | AE109s1 | Intron14 | 1 | ACE2_x14a | TTTTGAAAAGAACCACATGGC |
| Enzyme 2 | | | | | | |
| Angiotensin Converting | ACE2 | AE109s2 | Intron12 | 1 | ACE2_x13a | CAGCTGTGTCACAAGTCCTCA |
| Enzyme 2 | | | | | | |
| Angiotensin Converting | ACE2 | AE109s3 | Intron13 | 1 | ACE2_x13a | CAGCTGTGTCACAAGTCCTCA |
| Enzyme 2 | | | | | | |
| Angiotensin Converting | ACE2 | AE109s4 | Intron3 | 1 | ACE2_x3a | TCATTCATGTCCTTGCCCTTA |
| Enzyme 2 | | | | | | |
| Angiotensin Converting | ACE2 | AE109s5 | Intron2 | 1 | ACE2_x3a | TCATTCATGTCCTTGCCCTTA |
| Enzyme 2 | | | | | | |
| Angiotensin Converting | ACE2 | AE109s6 | Intron16 | 1 | ACE2_x16a | GCACACAGGAAGAACACACAA |
| Enzyme 2 | | | | | | |
| Angiotensin Converting | ACE2 | AE109s7 | Exon16 | 1 | ACE2_x16a | GCACACAGGAAGAACACACAA |
| Enzyme 2 | | | | | | |
| Protease Inhibitor 4 | Pl4 | AE110s1 | Intron1 | 0 | Pl4_X2a | GATCTGGAGCGACTGTTTCTG |
| Protease Inhibitor 4 | Pl4 | AE110s2 | Exon2 | 0 | Pl4_X2a | GATCTGGAGCGACTGTTTCTG |
| Protease Inhibitor 4 | Pl4 | AE110s3 | Intron2 | 0 | Pl4_X3a | CTTTCAACATCCATTTGTGGG |
| Protease Inhibitor 4 | Pl4 | AE110s4 | Intron2 | 0 | Pl4_X3a | CTTTCAACATCCATTTGTGGG |
| Protease Inhibitor 4 | Pl4 | AE110s5 | Exon1 | 0 | Pl4_X1.15a | CTACGCCATGCTTTCCCTG |
| Protease Inhibitor 4 | Pl4 | AE110s6 | 5′Flank | 0 | pl4_X1.12a | TTGGGGGAGAAACTGGAGTAT |
| Protease Inhibitor 4 | Pl4 | AE110s7 | 5′Flank | 0 | pl4_X1.12a | TTGGGGGAGAAACTGGAGTAT |
| Protease Inhibitor 4 | Pl4 | AE110s8 | 5′Flank | 0 | pl4_X1.11a | AAAAATTAGCTGGGTGTGGCT |
| Protease Inhibitor 4 | Pl4 | AE110s9 | 5′Flank | 0 | pl4_X1.11a | AAAAATTAGCTGGGTGTGGCT |
| Aminopeptidase P | XPNPEP2 | AE100s24 | Intron11 | 0 | XPNPEP2_X12a | ATCTCCATCATCTTGGAGCCT |
| (membrane-bound) | | | | | | |
| Aminopeptidase P | XPNPEP2 | AE100s25 | Intron13 | 0 | XPNPEP2_X13a | AGTTGAGAGGTAGAGGCAGCC |
| (membrane-bound) | | | | | | |
| Aminopeptidase P | XPNPEP2 | AE100s26 | Intron13 | 0 | XPNPEP2_X13a | AGTTGAGAGGTAGAGGCAGCC |
| (membrane-bound) | | | | | | |
| Aminopeptidase P | XPNPEP2 | AE100s27 | Intron7 | 0 | XPNPEP2_X8a | AGGGTTTCGCTGCTTTTTAAG |
| (membrane-bound) | | | | | | |
| Aminopeptidase P | XPNPEP2 | AE100s28 | Exon21 | 0 | XPNPEP2_X21.14a | CAATGCTGTTAAATCCTCCCA |
| (membrane-bound) | | | | | | |
| Aminopeptidase P | XPNPEP2 | AE100s29 | Exon21 | 0 | XPNPEP2_X21.14a | CAATGCTGTTAAATCCTCCCA |
| (membrane-bound) | | | | | | |
| Aminopeptidase P | XPNPEP2 | AE100s30 | Exon6 | 0 | XPNPEP2_X5a | ACATCCATCAGCTAATGCCAC |
| (membrane-bound) | | | | | | |
| Bradykinin Receptor B1 | BDKRB1 | AE103s10 | Exon3 | 0 | U48231_X2.16a | CTCAGCCTCCTGTAGCTGAGA |
| Bradykinin Receptor B1 | BDKRB1 | AE103s11 | Exon3 | 0 | U48231_X2.16a | CTCAGCCTCCTGTAGCTGAGA |
| Bradykinin Receptor B1 | BDKRB1 | AE103s12 | Exon3 | 0 | U48231_X2.16a | CTCAGCCTCCTGTAGCTGAGA |
| Bradykinin Receptor B1 | BDKRB1 | AE103s13 | Exon3 | 0 | U48231_X2.16a | CTCAGCCTCCTGTAGCTGAGA |
| Bradykinin Receptor B1 | BDKRB1 | AE103s14 | Exon3 | 0 | U48231_X2.16a | CTCAGCCTCCTGTAGCTGAGA |
| Bradykinin Receptor B2 | BDKRB2 | AE104s30 | Exon3 | 1 | BDKRB2_X3.12a | TTGCTGAGACAGGAACAGTCC |
| Bradykinin Receptor B2 | BDKRB2 | AE104s31 | Exon3 | 1 | BDKRB2_X1.11a | CTCTGTGCTGGGACAGTTTGT |
| Bradykinin Receptor B2 | BDKRB2 | AE104s32 | Intron1 | 1 | BDKRB2_X1.11a | CTCTGTGCTGGGACAGTTTGT |
| Bradykinin Receptor B2 | BDKRB2 | AE104s33 | Intron1 | 1 | BDKRB2_X1.11a | CTCTGTGCTGGGACAGTTTGT |
| Bradykinin Receptor B2 | BDKRB2 | AE104s34 | Exon3 | 1 | BDKRB2_X3.17a | CCCAGATCACCAAGCTGTAGA |
| Bradykinin Receptor B2 | BDKRB2 | AE104s35 | Exon3 | 1 | BDKRB2_X3.17a | CCCAGATCACCAAGCTGTAGA |
| Bradykinin Receptor B2 | BDKRB2 | AE104s36 | Exon3 | 1 | BDKRB2_X3.17a | CCCAGATCACCAAGCTGTAGA |
| Protease Inhibitor 4 | pl4 | AE110s10 | Exon4 | 0 | pl4_X4a | TCTCTTGCTGGCTTGGAGATA |
| Protease Inhibitor 4 | pl4 | AE110s11 | Exon1 | 0 | pl4_X1.11a | AAAAATTAGCTGGGTGTGGCT |
| Protease Inhibitor 4 | pl4 | AE110s12 | 5′Flank | 0 | pl4_X1.11a | AAAAATTAGCTGGGTGTGGCT |
| Tachykinin Receptor 1 | TACR1 | AE106s8 | Intron4 | 1 | TACR1_X4a | TGTCCCTCTTGTCTCACAGCT |
| Tachykinin Receptor 1 | TACR1 | AE106s9 | Intron3 | 1 | TACR1_X3a | CCTCTCCTCCTCTCTGTTGCT |
| Angiotensin Converting | ACE2 | AE109s8 | Intron13 | 1 | ACE2_X13a | CAGCTGTGTCACAAGTCCTCA |
| Enzyme 2 | | | | | | |
| Angiotensin Converting | ACE2 | AE109s9 | Intron6 | 1 | ACE2_X6a | TAAGGCTCACTCAAAAAGGCA |
| Enzyme 2 | | | | | | |

| | | Forward sequencing | | | Reverse sequencing |
|---|---|---|---|---|---|
| GENE_DESCRIPTION | forward seq name | primer (SEQ ID NO:) | Reverse sequencing primer | reverse seq name | primer (SEQ ID NO:) |
| Aminopeptidase P | AE100p79 | 423 | AGGCTGGTCTGACTGGAAAGT | AE100p80 | 486 |
| (membrane-bound) | | | | | |
| Aminopeptidase P | AE100p11 | 424 | TCCTGTTTGTGGTCTCTGACC | AE100p12 | 487 |
| (membrane-bound) | | | | | |
| Aminopeptidase P | AE100p59 | 425 | TGTCAGTGGCCTGAAATATCC | AE100p60 | 488 |
| (membrane-bound) | | | | | |
| Aminopeptidase P | AE100p59 | 426 | TGTCAGTGGCCTGAAATATCC | AE100p60 | 489 |
| (membrane-bound) | | | | | |
| Aminopeptidase P | AE100p3 | 427 | AGAGGTCAGAGCTGCCTTCC | AE100p4 | 490 |
| (membrane-bound) | | | | | |
| Aminopeptidase P | AE100p27 | 428 | TAAACAAGCATCCCAGGTGAC | AE100p28 | 491 |
| (membrane-bound) | | | | | |
| Aminopeptidase P | AE100p27 | 429 | TAAACAAGCATCCCAGGTGAC | AE100p28 | 492 |
| (membrane-bound) | | | | | |
| Aminopeptidase P | AE100p39 | 430 | AAGAAGGGAACTCACTGCACA | AE100p40 | 493 |
| (membrane-bound) | | | | | |
| Aminopeptidase P | AE100p39 | 431 | AAGAAGGGAACTCACTGCACA | AE100p40 | 494 |
| (membrane-bound) | | | | | |
| Aminopeptidase P | AE100p27 | 432 | TAAACAAGCATCCCAGGTGAC | AE100p28 | 495 |
| (membrane-bound) | | | | | |
| Aminopeptidase P | AE100p51 | 433 | GCAACTCCCTACTCCACACTG | AE100p52 | 496 |
| (membrane-bound) | | | | | |
| Aminopeptidase P | AE100p51 | 434 | GCAACTCCCTACTCCACACTG | AE100p52 | 497 |
| (membrane-bound) | | | | | |
| Aminopeptidase P | AE100p51 | 435 | GCAACTCCCTACTCCACACTG | AE100p52 | 498 |
| (membrane-bound) | | | | | |
| Aminopeptidase P | AE100p3 | 436 | AGAGGTCAGAGCTGCCTTCC | AE100p4 | 499 |
| (membrane-bound) | | | | | |
| Aminopeptidase P | AE100p3 | 437 | AGAGGTCAGAGCTGCCTTCC | AE100p4 | 500 |
| (membrane-bound) | | | | | |
| Aminopeptidase P | AE100p31 | 438 | CTTACCCTTCTTGGTTCCCAC | AE100p32 | 501 |
| (membrane-bound) | | | | | |
| Aminopeptidase P | AE100p67 | 439 | AGCTGGGTAACCTTGGGTAGA | AE100p68 | 502 |
| (membrane-bound) | | | | | |
| Aminopeptidase P | AE100p67 | 440 | AGCTGGGTAACCTTGGGTAGA | AE100p68 | 503 |
| (membrane-bound) | | | | | |
| Aminopeptidase P | AE100p59 | 441 | TGTCAGTGGCCTGAAATATCC | AE100p60 | 504 |
| (membrane-bound) | | | | | |
| Aminopeptidase P | AE100p83 | 442 | TGGGACCTTCTCCATAGGTCT | AE100p84 | 505 |
| (membrane-bound) | | | | | |
| Aminopeptidase P | AE100p83 | 443 | TGGGACCTTCTCCATAGGTCT | AE100p84 | 506 |
| (membrane-bound) | | | | | |
| Aminopeptidase P | AE100p87 | 444 | GGTTGATGTTTCATGCCCTG | AE100p88 | 507 |
| (membrane-bound) | | | | | |
| Aminopeptidase P | AE100p87 | 445 | GGTTGATGTTTCATGCCCTG | AE100p88 | 508 |
| (membrane-bound) | | | | | |
| Bradykinin Receptor B1 | AE103p15 | 446 | TCAATGCTGTTTTAATTCCGC | AE103p16 | 509 |
| Bradykinin Receptor B1 | AE103p7 | 447 | ATGAACAAATTGGCCTTGATG | AE103p8 | 510 |
| Bradykinin Receptor B1 | AE103p19 | 448 | AGGACCCATTCCTTCTGGAG | AE103p20 | 511 |
| Bradykinin Receptor B1 | AE103p3 | 449 | GGATCAGATGAACCCAGGAGT | AE103p4 | 512 |
| Bradykinin Receptor B1 | AE103p27 | 450 | TGGTGTGTTCATGCAATTTCT | AE103p28 | 513 |
| Bradykinin Receptor B2 | AE104p35 | 451 | CTTTGGGATTCCCTCCCTT | AE104p36 | 514 |
| Bradykinin Receptor B2 | AE104p35 | 452 | CTTTGGGATTCCCTCCCTT | AE104p36 | 515 |
| Bradykinin Receptor B2 | AE104p39 | 453 | CCGAGGTTCTCTGGAGAAAAA | AE104p40 | 516 |
| Bradykinin Receptor B2 | AE104p39 | 454 | CCGAGGTTCTCTGGAGAAAAA | AE104p40 | 517 |
| Bradykinin Receptor B2 | AE104p39 | 455 | CCGAGGTTCTCTGGAGAAAAA | AE104p40 | 518 |
| Bradykinin Receptor B2 | AE104p39 | 456 | CCGAGGTTCTCTGGAGAAAAA | AE104p40 | 519 |
| Bradykinin Receptor B2 | AE104p31 | 457 | GGTCCACTTGTCCTCCTTCTT | AE104p32 | 520 |
| Bradykinin Receptor B2 | AE104p27 | 458 | CAGAAAGCTGTTCGACGAGAC | AE104p28 | 521 |
| Bradykinin Receptor B2 | AE104p27 | 459 | CAGAAAGCTGTTCGACGAGAC | AE104p28 | 522 |
| Bradykinin Receptor B2 | AE104p27 | 460 | CAGAAAGCTGTTCGACGAGAC | AE104p28 | 523 |
| Bradykinin Receptor B2 | AE104p11 | 461 | TGGAGGAAGAAAACAGGTGAA | AE104p12 | 524 |
| Bradykinin Receptor B2 | AE104p11 | 462 | TGGAGGAAGAAAACAGGTGAA | AE104p12 | 525 |
| Bradykinin Receptor B2 | AE104p11 | 463 | TGGAGGAAGAAAACAGGTGAA | AE104p12 | 526 |
| Bradykinin Receptor B2 | AE104p23 | 464 | ACACAGTAGGTGCTCATTGGC | AE104p24 | 527 |
| Bradykinin Receptor B2 | AE104p5 | 465 | TGGATGAGGTTTTTGCATAGC | AE104p6 | 528 |
| Bradykinin Receptor B2 | AE104p5 | 466 | TGGATGAGGTTTTTGCATAGC | AE104p6 | 529 |
| Tachykinin Receptor 1 | AE106p25 | 467 | TTACCGCAAGAGAGATGCTGT | AE106p28 | 530 |
| Tachykinin Receptor 1 | AE106p19 | 468 | TGGCAGGAAAAATATGGAATC | AE106p20 | 531 |
| Tachykinin Receptor 1 | AE106p15 | 469 | GTAGCTGCCAAACCTTGACTG | AE106p15 | 532 |
| Tachykinin Receptor 1 | AE106p3 | 470 | GAGAGCTTCAGCTTCTCCTCC | AE106p4 | 533 |
| Tachykinin Receptor 1 | AE106p3 | 471 | GAGAGCTTCAGCTTCTCCTCC | AE106p4 | 534 |
| Tachykinin Receptor 1 | AE106p3 | 472 | GAGAGCTTCAGCTTCTCCTCC | AE106p4 | 535 |
| Tachykinin Receptor 1 | AE106p7 | 473 | AGGGTCACCTCTTCATCTGCT | AE106p8 | 536 |
| C1 Esterase Inhibitor | AE105p19 | 474 | TCTGCAGTCCATCCCTGATAC | AE105p20 | 537 |
| C1 Esterase Inhibitor | AE105p27 | 475 | ACCCCAAAATGATGGGACTAC | AE105p28 | 538 |
| C1 Esterase Inhibitor | AE105p31 | 476 | CCTGGGAGTAACCCTAAGCTG | AE105p32 | 539 |
| C1 Esterase Inhibitor | AE105p11 | 477 | ATCTGTTGGGAGCTGGGTAGT | AE105p12 | 540 |
| C1 Esterase Inhibitor | AE105p15 | 478 | GTCCAACAAATGACCTGGAGA | AE105p16 | 541 |
| C1 Esterase Inhibitor | AE105p35 | 479 | GAGCTGAGGCTGGAGAGGTAG | AE105p35 | 542 |
| Kallikrein 1 | AE107p15 | 480 | CCTCACCACACAGGTGTCTTT | AE107p16 | 543 |
| (renal/pancreas/salivary) | | | | | |
| Kallikrein 1 | AE107p15 | 481 | CCTCACCACACAGGTGTCTTT | AE107p16 | 544 |
| (renal/pancreas/salivary) | | | | | |
| Kallikrein 1 | AE107p15 | 482 | CCTCACCACACAGGTGTCTTT | AE107p16 | 545 |
| (renal/pancreas/salivary) | | | | | |
| Kallikrein 1 | AE107p15 | 483 | CCTCACCACACAGGTGTCTTT | AE107p16 | 546 |
| (renal/pancreas/salivary) | | | | | |
| Kallikrein 1 | AE107p19 | 484 | GTGCACCACATCTGGAAAGAT | AE107p20 | 547 |
| (renal/pancreas/salivary) | | | | | |
| Kallikrein 1 | AE107p19 | 485 | GTGCACCACATCTGGAAAGAT | AE107p20 | 548 |
| (renal/pancreas/salivary) | | | | | |
| Bradykinin Receptor B1 | AE103p11 | 771 | CACTCTTGTCCTGCTGACCTC | AE103p12 | 803 |
| Bradykinin Receptor B1 | AE103p11 | 772 | CACTCTTGTCCTGCTGACCTC | AE103p12 | 804 |
| Bradykinin Receptor B1 | AE103p11 | 773 | CACTCTTGTCCTGCTGACCTC | AE103p12 | 805 |
| Bradykinin Receptor B1 | AE103p15 | 774 | TCAATGCTGTTTTAATTCCGC | AE103p16 | 806 |
| Bradykinin Receptor B2 | AE104p67 | 775 | GGTTGTGCTGCTGCTATTCAT | AE104p68 | 807 |
| Bradykinin Receptor B2 | AE104p67 | 776 | GGTTGTGCTGCTGCTATTCAT | AE104p68 | 808 |
| Bradykinin Receptor B2 | AE104p91 | 777 | GCCACCCATAAACTGATCTGA | AE104p92 | 809 |
| Bradykinin Receptor B2 | AE104p91 | 778 | GCCACCCATAAACTGATCTGA | AE104p92 | 810 |
| Bradykinin Receptor B2 | AE104p87 | 779 | AGAAACCTCCGCCATACATCT | AE104p88 | 811 |
| Bradykinin Receptor B2 | AE104p83 | 780 | GAGCTACGCAAACATGGAAAT | AE104p84 | 812 |
| Bradykinin Receptor B2 | AE104p67 | 781 | GGTTGTGCTGCTGCTATTCAT | AE104p88 | 813 |
| Bradykinin Receptor B2 | AE104p67 | 782 | GGTTGTGCTGCTGCTATTCAT | AE104p88 | 814 |
| Bradykinin Receptor B2 | AE104p63 | 783 | TGAGGGACAGTTGCTTTTCAG | AE104p84 | 815 |
| Bradykinin Receptor B2 | AE104p59 | 784 | TGCCCTGGGTTTCTTTAATCT | AE104p60 | 816 |
| Bradykinin Receptor B2 | AE104p55 | 785 | TATTGCACAACCATCTGTCCC | AE104p56 | 817 |
| Bradykinin Receptor B2 | AE104p55 | 786 | TATTGCACAACCATCTGTCCC | AE104p56 | 818 |
| Angiotensin Converting | AE109p27 | 787 | AGTGGGATCTTTGGAGGAAAA | AE109p28 | 819 |
| Enzyme 2 | | | | | |
| Angiotensin Converting | AE109p31 | 788 | ACATCTGGAACCCCTCAAAAG | AE109p32 | 820 |
| Enzyme 2 | | | | | |
| Angiotensin Converting | AE109p31 | 789 | ACATCTGGAACCCCTCAAAAG | AE109p32 | 821 |
| Enzyme 2 | | | | | |
| Angiotensin Converting | AE109p71 | 790 | TCTTCAGCAAAATTTCCATTGTT | AE109p72 | 822 |
| Enzyme 2 | | | | | |
| Angiotensin Converting | AE109p71 | 791 | TCTTCAGCAAAATTTCCATTGTT | AE109p72 | 823 |
| Enzyme 2 | | | | | |
| Angiotensin Converting | AE109p19 | 792 | CCTCCCCCATGTCTCTCTATC | AE109p20 | 824 |
| Enzyme 2 | | | | | |
| Angiotensin Converting | AE109p19 | 793 | CCTCCCCCATGTCTCTCTATC | AE109p20 | 825 |
| Enzyme 2 | | | | | |
| Protease Inhibitor 4 | AE110p23 | 794 | CACACTGATTACCTCTTCCGC | AE110p24 | 826 |
| Protease Inhibitor 4 | AE110p23 | 795 | CACACTGATTACCTCTTCCGC | AE110p24 | 827 |
| Protease Inhibitor 4 | AE110p27 | 796 | ACTTTGGATGCCTCCAGTTTT | AE110p28 | 828 |
| Protease Inhibitor 4 | AE110p27 | 797 | ACTTTGGATGCCTCCAGTTTT | AE110p28 | 829 |
| Protease Inhibitor 4 | AE110p19 | 798 | CGGTGGTGTGGATTTAGCATA | AE110p20 | 830 |
| Protease Inhibitor 4 | AE110p7 | 799 | CCAACAGAGCAGGAAATGAAG | AE110p8 | 831 |
| Protease Inhibitor 4 | AE110p7 | 800 | CCAACAGAGCAGGAAATGAAG | AE110p8 | 832 |
| Protease Inhibitor 4 | AE110p3 | 801 | TAAGTGACCTGCCCAAAGTTG | AE110p4 | 833 |
| Protease Inhibitor 4 | AE110p3 | 802 | TAAGTGACCTGCCCAAAGTTG | AE110p4 | 834 |
| Aminopeptidase P | AE100p47 | 1014 | ACCCAAGAACCTGTCACTCCT | AE100p48 | 1040 |
| (membrane-bound) | | | | | |
| Aminopeptidase P | AE100p51 | 1015 | GCAACTCCCTACTCCACACTG | AE100p52 | 1041 |
| (membrane-bound) | | | | | |
| Aminopeptidase P | AE100p51 | 1016 | GCAACTCCCTACTCCACACTG | AE100p52 | 1042 |
| (membrane-bound) | | | | | |
| Aminopeptidase P | AE100p31 | 1017 | CTTACCCTTCTTGGTTCCCAC | AE100p32 | 1043 |
| (membrane-bound) | | | | | |
| Aminopeptidase P | AE100p95 | 1018 | CTCACCCTCTCTTCTTCCTCC | AE100p95 | 1044 |
| (membrane-bound) | | | | | |
| Aminopeptidase P | AE100p95 | 1019 | CTCACCCTCTCTTCTTCCTCC | AE100p96 | 1045 |
| (membrane-bound) | | | | | |
| Aminopeptidase P | AE100p19 | 1020 | GAACCTAGTCCAGGTCCCAAG | AE100p20 | 1046 |
| (membrane-bound) | | | | | |
| Bradykinin Receptor B1 | AE103p27 | 1021 | TGGTGTGTTCATGCAATTTCT | AE103p28 | 1047 |
| Bradykinin Receptor B1 | AE103p27 | 1022 | TGGTGTGTTCATGCAATTTCT | AE103p28 | 1048 |
| Bradykinin Receptor B1 | AE103p27 | 1023 | TGGTGTGTTCATGCAATTTCT | AE103p28 | 1049 |
| Bradykinin Receptor B1 | AE103p27 | 1024 | TGGTGTGTTCATGCAATTTCT | AE103p28 | 1050 |
| Bradykinin Receptor B1 | AE103p27 | 1025 | TGGTGTGTTCATGCAATTTCT | AE103p28 | 1051 |
| Bradykinin Receptor B2 | AE104p55 | 1026 | TATTGCACAACCATCTGTCCC | AE104p56 | 1052 |
| Bradykinin Receptor B2 | AE104p83 | 1027 | GAGCTACGCAAACATGGAAAT | AE104p84 | 1053 |
| Bradykinin Receptor B2 | AE104p83 | 1028 | GAGCTACGCAAACATGGAAAT | AE104p84 | 1054 |
| Bradykinin Receptor B2 | AE104p83 | 1029 | GAGCTACGCAAACATGGAAAT | AE104p84 | 1055 |
| Bradykinin Receptor B2 | AE104p75 | 1030 | CTTTTCCACTTTCTTTCAGCG | AE104p76 | 1056 |
| Bradykinin Receptor B2 | AE104p75 | 1031 | CTTTTCCACTTTCTTTCAGCG | AE104p76 | 1057 |
| Bradykinin Receptor B2 | AE104p75 | 1032 | CTTTTCCACTTTCTTTCAGCG | AE104p76 | 1058 |
| Protease Inhibitor 4 | AE110p31 | 1033 | CAGGGTGTGGAATGTCCAG | AE110p32 | 1059 |
| Protease Inhibitor 4 | AE110p3 | 1034 | TAAGTGACCTGCCCAAAGTTG | AE110p4 | 1060 |
| Protease Inhibitor 4 | AE110p3 | 1035 | TAAGTGACCTGCCCAAAGTTG | AE110p4 | 1061 |
| Tachykinin Receptor 1 | AE106p11 | 1036 | CTCACCTGTCTCACCCTCTTG | AE106p12 | 1062 |
| Tachykinin Receptor 1 | AE106p15 | 1037 | GTAGCTGCCAAACCTTGACTG | AE106p16 | 1063 |
| Angiotensin Converting | AE109p31 | 1038 | ACATCTGGAACCCCTCAAAAG | AE109p32 | 1064 |
| Enzyme 2 | | | | | |
| Angiotensin Converting | AE109p59 | 1039 | TCTTCCTGGGCTTTTCAGATT | AE109p60 | 1065 |
| Enzyme 2 | | | | | |

[1479] TABLE X

| | | | | OR- | | |
|---|---|---|---|---|---|---|
| | | | | CHID_{—} | | |
| | | ORCHID_{—} | | RIGHT | | ORCHID_{—} |
| | | LEFT (SEQ | | (SEQ | | SNPIT (SEQ |
| SNP_ID | ORCHID_LEFT | ID NO:) | ORCHID_RIGHT | ID NO:) | ORCHID_SNPIT | ID NO:) |
| AE100s1 | TATCATTTGTGCCCTATGACCG | 1066 | CAGGGTCAGGGAGAAGGC | 1154 | CCTCATCGATGTCNGCCTGCTGTCTCC | 1242 |
| AE100s10 | AAACTTCATCATCAGAGGTACCAAAG | 1067 | GAGGACATTTTGATTCAGACTCCTC | 1155 | GTGGTTTGCAAACCTTAGCATGCAC | 1243 |
| AE100s11 | ATAGAATGACTTCCTCCAGAGGGA | 1068 | CAGCCTAACCCTGYACTGGG | 1156 | TGGAAGCCCAGNCCCCAGAGGT | 1244 |
| AE100s12 | TCCAGAGGGACTGGCCTG | 1069 | GAAGGGCAGCCTAACCCTG | 1157 | AGCCCAGGCCCCAGAGGTYCTCCCA | 1245 |
| AE100s13 | ATAGAATGACTTCCTCCAGAGGGA | 1070 | GCTGAGAAGGGGAGAGAATGTT | 1158 | AATGTTGAGAANGNCAGCCTAACCCTG | 1246 |
| AE100s14 | N/A | N/A | N/A | N/A | N/A | N/A |
| AE100s15 | ACCCTCTGTCTGCTCGAG | 1071 | GATGGAGGGACAAGGGAG | 1159 | CCCGGSCTCTTCCTTCANGCNTTTCCT | 1247 |
| AE100s16 | AAAGAAGGAAGGAAGGAAAGGAA | 1072 | GTGTAGGAATAGAAGAAGGGGTTATAGG | 1160 | AGAAAAGCTTGNCTCAGGCAGATCAGC | 1248 |
| AE100s17 | N/A | N/A | N/A | N/A | N/A | N/A |
| AE100s18 | AACACAGCAAGACCCCTCTCA | 1073 | GATCCCAGAGCATCTCTATGAGC | 1161 | TACCTAAATAAATAATAAAAGCCAG | 1249 |
| AE100s19 | N/A | N/A | N/A | N/A | N/A | N/A |
| AE100s2 | ATAGAATTTGCAGGGCAGGG | 1074 | GTATCTTTTGCAGTTCAACTCCCC | 1162 | GCAACAAGTCTCCTTTNCAGAACAGTC | 1250 |
| AE100s20 | TACCACAACAGGGGACTGG | 1075 | GATTCAGGTACTGGAGCTGCG | 1163 | AGACTTCACCTCTTGGCANCTTGGCTT | 1251 |
| AE100s21 | N/A | N/A | N/A | N/A | N/A | N/A |
| AE100s22 | N/A | N/A | N/A | N/A | N/A | N/A |
| AE100s23 | TTTGCCTAAGGACACACAAATTT | 1076 | GAGGTGGGCTCAGGGACT | 1164 | CTGCATGTTGCTGAAGGGTGAAAGA | 1252 |
| AE100s24 | CGCTATCTGATCTCCATCATCT | 1077 | CCGCACCTGGAGTTGGGG | 1165 | TTNGAGCCTGTGGCTNCAACCAGACCT | 1253 |
| AE100s25 | N/A | N/A | N/A | N/A | N/A | N/A |
| AE100s26 | N/A | N/A | N/A | N/A | N/A | N/A |
| AE100s27 | ACAAGTAAGAGTTTGTTTGAGGAAAGG | 1078 | GAGCCCCAAAAAAGTGTAAGTGA | 1166 | TTACCCTANGGCTGACCTNCCAGGAAC | 1254 |
| AE100s28 | N/A | N/A | N/A | N/A | N/A | N/A |
| AE100s29 | N/A | N/A | N/A | N/A | N/A | N/A |
| AE100s3 | N/A | N/A | N/A | N/A | N/A | N/A |
| AE100s30 | TATCTTTCTTTCAGTTGGCACCA | 1079 | CAATGGACAAGAGGAAGGGG | 1167 | TCACCTGGCTCCTCACCGAGATTCC | 1255 |
| AE100s4 | TCCCTGCTGCTTCCCCGG | 1080 | AATATTTGTGCACTGATTTACCAGAATAG | 1168 | TATTTCAGNCCACTGACANGGCCTCAG | 1256 |
| AE100s5 | N/A | N/A | N/A | N/A | N/A | N/A |
| AE100s6 | TGTGTGTGCATGAGTGTAGGTG | 1081 | CTTTGTCATTTCCATACCTGTGAAA | 1169 | ACCTTCATAGAGGGTATAATAAAAG | 1257 |
| AE100s7 | ATCCAGTAATGGCAAAGCCAG | 1082 | GTCAGCCTTAGGGTAACAGTTTTG | 1170 | AAGAGTTTGTTTGAGGAAAGGGTTT | 1258 |
| AE100s8 | GCAAATCTCACGTCTGCTG | 1083 | CAGGTCTGGGGGCACAGTA | 1171 | GTAAAGGAGGTCTCNATNGCACAGGGG | 1259 |
| AE100s9 | AAAACTAGGAAAGACAGAAAGCACAC | 1084 | TTTCAGAGGACTGGCAGGAG | 1172 | CACAGAGTAGAGAGNATTGCCACGAAA | 1260 |
| AE103s1 | AACTTCTTTGCCTTCACTAACAGCT | 1085 | GATGAAGATATTGGAGCAAGACTTTTAG | 1173 | CCAGTAATTTATGTCTTTGTGGGCC | 1261 |
| AE103s10 | N/A | N/A | N/A | N/A | N/A | N/A |
| AE103s11 | TGGACTTGATGAATGTTACCAAATT | 1086 | GACTCTGAGCCTCCTGCCTC | 1174 | ATCCTGAATTATCCAAGTGGGCCCT | 1262 |
| AE103s12 | N/A | N/A | N/A | N/A | N/A | N/A |
| AE103s13 | CCACCGAGTTTCTGGTAATTTG | 1087 | CTTTGAATAGACAAATGGAAGTGTARTAAGA | 1175 | CAGCAGGAAACAAATAACAAGTATC | 1263 |
| AE103s14 | TGTCATAGCAGCAGCAGGAA | 1088 | CCTGGCAGTTAGCCTAGAAAGC | 1176 | ACAAGTATCRGGTAATGNCCTCTCTTA | 1264 |
| AE103s2 | TGACAATGCTCCAGAAGCC | 1089 | CAACAGGACAAAAAGGTTCCC | 1177 | CTGGGACCTGCTGNACAGAGTGCTGCC | 1265 |
| AE103s3 | ACTTTTCTGGCGGAATTAAAACA | 1090 | ACCCCCCAATCTACGGGA | 1178 | TGAACCAANANGCTTGGCTTTCTTATC | 1266 |
| AE103s4 | N/A | N/A | N/A | N/A | N/A | N/A |
| AE103s5 | N/A | N/A | N/A | N/A | N/A | N/A |
| AE103s6 | TTCTGGGCAGAGAATATCTGGA | 1091 | CCACCAGGAAGATGCTGATG | 1179 | GAGCCCTCCTCTGCCGTGTCATCAA | 1267 |
| AE103s7 | N/A | N/A | N/A | N/A | N/A | N/A |
| AE103s8 | ATCTGAACATCACCGCCT | 1092 | GTAGTTGAAGAAGACGATCGC | 1180 | AGATCTGAACATCACCGCCTGCATC | 1268 |
| AE103s9 | N/A | N/A | N/A | N/A | N/A | N/A |
| AE104s1 | GAGAGCAATAAATGTCTGTTTTTTGATAA | 1093 | CTCACCTGTGCTGCTTGTG | 1181 | CACTGGGCAAATCNGCNGGGCTCCCCC | 1269 |
| AE104s10 | GGTTGGGGCCTCAGGGTG | 1094 | GTGGCGGTGTGAAGCACC | 1182 | GTNGGAATGACAGGTNGAAGGGAGCCA | 1270 |
| AE104s11 | TTGGATGTGAAATGCTTCCTG | 1095 | GCCCTATGCATGGTGTAGATG | 1183 | TTACAACATAACAGCNCATTGAGTCTT | 1271 |
| AE104s12 | ATTTTCTCGTTTGGATGTGAAATG | 1096 | CGGCCCTATGCATGGTGTA | 1184 | TAACAGCTCATTGAGTCTTKCACAG | 1272 |
| AE104s13 | GCCATTGCGGCAGAGCTC | 1097 | AAAAAAAGAGGCTGTGTTTTGTCA | 1185 | GGGCAGTCATTCAGCACCAGAGCAC | 1273 |
| AE104s14 | AAGTGAATGAGTGCTGCCCT | 1098 | AAGGTGGCCCAGTATGAGC | 1186 | CCCTAGAAGAGTGTGAAAAGGAATG | 1274 |
| AE104s16 | GATGCATGGATGGAGGAGG | 1099 | CAGTGATGGGGAATTCATTATCC | 1187 | ATTCCTTCACTCATNTATNAAACAAAA | 1275 |
| AE104s17 | GATGGAACAGATGAAGGAGAGG | 1100 | CATAAATGCCCCTCCTCCAT | 1188 | TACGTTGAGCGATGAGCCCCAGGTT | 1276 |
| AE104s18 | AGAAGAAAAGATGGTTAGATGGCA | 1101 | CATTGAGTCAGGGACTCAGCA | 1189 | ACAGGGGCTGGGGATNGCNAAATACAC | 1277 |
| AE104s19 | TAACTAGTGAACTGAGGAATCCCTTT | 1102 | CACTCTGAGTCCAAATGTTCTCTC | 1190 | GTGGTGGGCACGGAGTCCTCAC | 1278 |
| AE104s2 | GAGAGCAATAAATGTCTGTTTTTTGATAA | 1103 | CTCACCTGTGCTGCTTGTG | 1191 | GTCAGGGAGGGGCNCACCTGGGCGCGG | 1279 |
| AE104s20 | TTTACACTCCCAGGGCTGAG | 1104 | CTCTTCCCCAGATCCACTGG | 1192 | TTTTTGNAGCCTTAAAACCCTTCCTTC | 1280 |
| AE104s21 | GGATTTCTTTGTAYGCCACGTAC | 1105 | CATACATCTCCGAAGAAACGG | 1193 | GCAGAAGCTGTCCTGTTTCCTGGGT | 1281 |
| AE104s22 | N/A | N/A | N/A | N/A | N/A | N/A |
| AE104s23 | AGAGCTGGAGTGGCGGCG | 1106 | GCAGGAGTGCAGAGCTCAG | 1194 | GAAGTGCCCAGGAGGCTGNTGACATCA | 1282 |
| AE104s24 | N/A | N/A | N/A | N/A | N/A | N/A |
| AE104s25 | N/A | N/A | N/A | N/A | N/A | N/A |
| AE104s26 | TGAATAGATTAAAGAAACCCAGGG | 1107 | GTTCTCCGTCCCTGCCCC | 1195 | CATTGCACCAAANCTGGATGGC | 1283 |
| AE104s27 | TCGACCGTCTCGTCGAAC | 1108 | GAAAGAGAAGGAGCCATCTCCA | 1196 | GCTTTCNGGTGGTGNCAGTGCCCAGTC | 1284 |
| AE104s28 | N/A | N/A | N/A | N/A | N/A | N/A |
| AE104s29 | N/A | N/A | N/A | N/A | N/A | N/A |
| AE104s3 | TTTGCAAGGGAGGGAATC | 1109 | CAACCCTGCACTCCAAGC | 1197 | GAGCGAAGGGCTGGCTGAGGTCATG | 1285 |
| AE104s30 | N/A | N/A | N/A | N/A | N/A | N/A |
| AE104s31 | N/A | N/A | N/A | N/A | N/A | N/A |
| AE104s32 | N/A | N/A | N/A | N/A | N/A | N/A |
| AE104s33 | TAGGGATACAATGGCTAGGAGCT | 1110 | GTTTGGGACCCCATGTTCTAT | 1198 | ACCTTTTGCTTGATTTTTCACTGTA | 1286 |
| AE104s34 | ACACTGGTGCTTCACACCG | 1111 | GTACATGTGAGGCATCWTTACGC | 1199 | GGCTCCCAATACTGATTCTGCTCCA | 1287 |
| AE104s35 | N/A | N/A | N/A | N/A | N/A | N/A |
| AE104s36 | CCCTTCTGCTGTCCATATCA | 1112 | CATCTTGAAGGAACTCAAAGACTCA | 1200 | ACCCACAGCACCCTGCTNGACCGTCTC | 1288 |
| AE104s4 | AGTGAGAGGCTTGGAGTGCA | 1113 | CTTTGGATGAAAAAGAGGAAGCA | 1201 | AGGGTTGCAGGGAGANCTGGGATGAGG | 1289 |
| AE104s5 | TGCAGGGTTGCAGGGAGA | 1114 | CAAGAGAAGGCGTCTTTGGAT | 1202 | GCTGGGATGANGYCTGGGGTGCTGCCT | 1290 |
| AE104s6 | GGCTCACAACTGTGGAATGTC | 1115 | CAAAGAGGCCCTGCCCGA | 1203 | GTTCTCTGGAGAAAAAACTGTGCTG | 1291 |
| AE104s7 | AACTGTGGCCCAGAGGGT | 1116 | AACCCCTTACCCACCAGC | 1204 | CCCCCTCTCCAAGTCTNTGTCCCACAA | 1292 |
| AE104s8 | ATGTACGTAGCACCCTTTGCTTT | 1117 | GGAGACCAAGGTTCCAGCTC | 1205 | GAAGAGGGAACTGAGGCAGGGACAG | 1293 |
| AE104s9 | TATTTCTAGACCTCAGTGTCTTTTCCTTATAG | 1118 | GAAGTCGTTGTGAGGGTTAAAGG | 1206 | AAGGGTGCTACGTANATNTGAGGCATC | 1294 |
| AE105s1 | GAGAGGACTCTGAAGGGGG | 1119 | AGGTCTTCACCTGCTCTGCA | 1207 | CCCAGCGCTGGGGAAAGAAAGGACA | 1295 |
| AE105s2 | ATTGTGACAGAGGGTGGGG | 1120 | CAAACTCAGATTGTGGGAGAGC | 1208 | GAGATGCGGTAGGAAGACTGTTAAG | 1296 |
| AE105s3 | N/A | N/A | N/A | N/A | N/A | N/A |
| AE105s4 | GCGAAGGGAAGGTCGCAA | 1121 | TTGAGTTGGTTGTCGGCAA | 1209 | AAGCTGGAANCCTCNAGGATGGGTTCA | 1297 |
| AE105s5 | TGTTGGGGGATGCTTTGG | 1122 | GATGCTGAATGGGGAAAAGG | 1210 | AAGCTCTACCACGCCTTCTCAG | 1298 |
| AE105s6 | ATCTCTGTGGCCCGCACC | 1123 | CATATACTCGCCCCATGAAGAC | 1211 | GGAACTTGTNCTNCTGGTCCCAGAGCA | 1299 |
| AE106s1 | TATCAAAGGCCACAGCCG | 1124 | CACAACGAATGGTACTACGGC | 1212 | TACTGGCGAAGACAGCGGCGATGGG | 1300 |
| AE106s2 | ATGGTCTCTGTGGTTGAGTAGTAGC | 1125 | CATCATACATCCCCTCCAGC | 1213 | CCAGCAGGAGAGCCAGGACCCA | 1301 |
| AE106s3 | ATACCTGGGGATATTTTGTGC | 1126 | CTACCACGAGCAAGTCTCTG | 1214 | CCAAGCGCAAGGTGAGCAGGGG | 1302 |
| AE106s4 | TGCAGAATTCATCCTGAAATGA | 1127 | CTGTKTGACTCAAACCAAATCACT | 1215 | AGGTCGGACCANCTTTTCCCAA | 1303 |
| AE106s5 | AAAAGCTGGTCCGACCTTTTATT | 1128 | TCAAAAAATCTCAATTCTTCCCTATCT | 1216 | TCCCTATCTTTGCNACNCTNATGCTGT | 1304 |
| AE106s6 | TTTGAGTCAMACAGCATGAGG | 1129 | CATGGAAATTCCCTTCATCTG | 1217 | ACCCATACTGACCCTTTTNGCAAGTCC | 1305 |
| AE106s7 | ATGGTCTTGGAGTCACTTCGTG | 1130 | CCCACGAGGAGGAGCCAG | 1218 | AGAGCAGTTNGAGGTCAGGTNCAGGGA | 1306 |
| AE106s8 | N/A | N/A | N/A | N/A | N/A | N/A |
| AE106s9 | N/A | N/A | N/A | N/A | N/A | N/A |
| AE107s1 | GTTCGTAGTCTCATTTCCAGATGATC | 1131 | ACACACAGCATGAAGTCTGTCAC | 1219 | CAAAATCCTGCCTAATGATGAGTGC | 1307 |
| AE107s2 | AGCATCGAACCAGAGAATTGTATG | 1132 | CTTCCCTGGCCCTTTCTC | 1220 | TCCCTTGNACRCAGGAGTCCCCATCCC | 1308 |
| AE107s3 | CCTGCTGATACCATCACAGATG | 1133 | CATACAATTCTCTGGTTCGATGC | 1221 | GCTGTGAAGNTCGNGGAGTTGCCCACC | 1309 |
| AE107s4 | ATCGAACCAGAGAATTGTATGTGG | 1134 | GGGAGAAAAAGGGCTGCA | 1222 | AAGGCRGGGATGGGGACTCCTG | 1310 |
| AE107s5 | ACCTGGACCCACTCGGCT | 1135 | CCTTTCCCCACCTGCTGG | 1223 | TGNGGCCACCCCAGCTGTGTCA | 1311 |
| AE107s6 | CCAGTAAAATCAAATGTGCATCC | 1136 | CAGCCTCAGCCGAGTGGG | 1224 | ATGTGTGTCACGTTCTGCCATCACC | 1312 |
| AE109s1 | AATAGCTTATCCAATAAGGAATAGGTTACTTT | 1137 | GAATTGATTATTTTTGAGTGCACAGTC | 1225 | ATCTGGAACTTATAGTNTTGAAAAGAA | 1313 |
| AE109s2 | GGGGGTTCAGGGCCTTTT | 1138 | GCAAATTTAGCCAAGTCAAAGAGA | 1226 | GAGGGGTTCCAGANGTACNTATATTTA | 1314 |
| AE109s3 | TGGGGCCAAAGGAGACTAG | 1139 | GCTGAAAGACCAGAACAAGAATTC | 1227 | AAGTAGACAAGGAATGGGTGTGAAA | 1315 |
| AE109s4 | GTGTTGAAACACACATATCTGCAAT | 1140 | TGGAAAAGTTTGTAACCCAGATAATC | 1228 | TCATAATCACNANTNAAANTTAGTAGC | 1316 |
| AE109s5 | GTGTTCAACTGCAAATTAAAGATAATAAACA | 1141 | ACATGGCAAAGAAGTAAATTGCTG | 1229 | GAAATTTTGCTGAAGAGAATGCTAA | 1317 |
| AE109s6 | AACTCAAATCAAGATTATTCCCCTG | 1142 | GTTACCAAATACAACAACAATAACCAGTATT | 1230 | CACATGTAAATGACTCAGAATAATG | 1318 |
| AE109s7 | CCCTCACCCTTAGATGAAAGTAAAA | 1143 | TTTGAAACCAAGAATCTCCTTTAATTT | 1231 | TTCAGTTCTAGGAATNATATCAGACAC | 1319 |
| AE109s8 | N/A | N/A | N/A | N/A | N/A | N/A |
| AE109s9 | AGGCTCACTCAAAAAGGCAATT | 1144 | TGCCTCCCTGCTCATTTG | 1232 | CTTGGTAANAAGCCCCATNAATTCTTC | 1320 |
| AE110s1 | N/A | N/A | N/A | N/A | N/A | N/A |
| AE110s10 | CACCTTGGACGTGGATGAG | 1145 | ATGTGGCGATTGGTCTGG | 1233 | GGNTGGCACCGAGGNTGCAGCAGCCAC | 1321 |
| AE110s11 | CACCTCCTGCACACTCTCA | 1146 | CATGGTGTCATTCAGGAATTTTG | 1234 | AACCTCNCCGGNCATGGGCTGGAAACA | 1322 |
| AE110s12 | AGATTTGGGGGAGAAACTGG | 1147 | CAGTAGAACTGGTCTTTGTATTGTTACC | 1235 | TNTCTTGGACAGATGTTNATTATGAAA | 1323 |
| AE110s2 | CTGTACCTTCTTTTCATCTTCCCTT | 1148 | GCAGCATCATGGGCACCC | 1236 | CCGGACTGNTGTGTTCTCATCAACATA | 1324 |
| AE110s3 | AAGGAGGGCTCTGCCCAG | 1149 | GATGCAACTCTAGCTTCTTGTAAAAATT | 1237 | GATCCTGGCTTGTTCANTANTCTAATG | 1325 |
| AE110s4 | N/A | N/A | N/A | N/A | N/A | N/A |
| AE110s5 | CTTATCAACGACCACGTCAAGAA | 1150 | GATTTAGCATATACCAATGATCTGACTCT | 1238 | GAGGGAAGATTGTGGATTTGGTCAG | 1326 |
| AE110s6 | GTCAAACTAAATGGCTGAAAGTGG | 1151 | TTTCAGATGAGTTGATTTCATTAGTGC | 1239 | AGACCCTAAAATAAACTCTGAGGAT | 1327 |
| AE110s7 | AGGGTCAAACTAAATGGCTGAAA | 1152 | CACTTGTCTTTCAGATGAGTTGATTTC | 1240 | TAAACCATATAAAGCACTCCACAGA | 1328 |
| AE110s8 | AGAAACTGGAGTATCCTTTCTTGGA | 1153 | CTGTAGAGGTCAGTAGAACTGGTCTTTG | 1241 | TATGAAACGNGTACCANTTCTATCCCC | 1329 |
| AE110s9 | N/A | N/A | N/A | N/A | N/A | N/A |

[1480]

| SNP_ID | GBS_LEFT | GBS_LEFT (SEQ ID NO:) | GBS_RIGHT | GBS_RIGHT (SEQ ID NO:) |
|---|---|---|---|---|
| AE100s1 | TGTAAAACGACGGCCAGTAGTTCCTCCTCCTCCCTCACT | 1330 | CAGGAAACAGCTATGACCAGAAGCTCTGGGGTCTC | 1451 |
| AE100s10 | TGTAAAACGACGGCCAGTGGCATTCACAGGTGATTCAGT | 1331 | CAGGAAACAGCTATGACCCACCAGGCAAGCAAATC | 1452 |
| AE100s11 | TGTAAAACGACGGCCAGTTTCTGGGCTTTACCCTCTCTC | 1332 | CAGGAAACAGCTATGACCAGGTCTGAGCAGAGACA | 1453 |
| AE100s12 | TGTAAAACGACGGCCAGTTTCTGGGCTTTACCCTCTCTC | 1333 | CAGGAAACAGCTATGACCAGGTCTGAGCAGAGACA | 1454 |
| AE100s13 | TGTAAAACGACGGCCAGTCCAGGTGCAGGATTAACAGAC | 1334 | CAGGAAACAGCTATGACCAGGTCTGAGCAGAGACA | 1455 |
| AE100s14 | TGTAAAACGACGGCCAGTACTAGGAACTTGCACAGTCCG | 1335 | CAGGAAACAGCTATGACCATGCACATACCACAGAG | 1456 |
| AE100s15 | TGTAAAACGACGGCCAGTCCTCACACCCTATCCTACACG | 1336 | CAGGAAACAGCTATGACCATGCACATACCACAGAG | 1457 |
| AE100s16 | TGTAAAACGACGGCCAGTCAGTGAGATCTTGCCACTGC | 1337 | CAGGAAACAGCTATGACCCAAGCTAAGGAAAAGCC | 1458 |
| AE100s17 | TGTAAAACGACGGCCAGTCAGGCAGACAATGATGTGATG | 1338 | CAGGAAACAGCTATGACCTGTGCTCCTCTGAAGTC | 1459 |
| AE100s18 | TGTAAAACGACGGCCAGTTATCCAGGTATGGTGGCATGT | 1339 | CAGGAAACAGCTATGACCATAGCGATGTTGTTGGA | 1460 |
| AE100s19 | TGTAAAACGACGGCCAGTCAGAGGGAAGCACGTGATG | 1340 | CAGGAAACAGCTATGACCACTGGTTTCTGAAACCC | 1461 |
| AE100s2 | TGTAAAACGACGGCCAGTTGTAAAGCCCTTTGCAGAAGT | 1341 | CAGGAAACAGCTATGACCCTTGTCAGCTACAAGCC | 1462 |
| AE100s20 | TGTAAAACGACGGCCAGTCTCTGAAAAGCCCCAGAGAAT | 1342 | CAGGAAACAGCTATGACCCTGTTGAAGCCACTCGA | 1463 |
| AE100s21 | TGTAAAACGACGGCCAGTGAGGCTCCAGACTCTCCTGTT | 1343 | CAGGAAACAGCTATGACCGGAGCAGCTGTAGCAGT | 1464 |
| AE100s22 | TGTAAAACGACGGCCAGTCATTGCCTAGAAACCTTTGCA | 1344 | CAGGAAACAGCTATGACCATTGCTCTCTTGGGGTT | 1465 |
| AE100s23 | TGTAAAACGACGGCCAGTAGCCACAGCTACAATGCTGTT | 1345 | CAGGAAACAGCTATGACCAAAACCCAGAGGCAAGT | 1466 |
| AE100s24 | TGTAAAACGACGGCCAGTCTGCCGTCAACACAGAACTCT | 1346 | CAGGAAACAGCTATGACCGAACTTGTCCACGATCT | 1467 |
| AE100s25 | TGTAAAACGACGGCCAGTAGAAGAACAGTTCTCCTCCGG | 1347 | CAGGAAACAGCTATGACCCCATGTGAACTCGTGAG | 1468 |
| AE100s26 | TGTAAAACGACGGCCAGTCATGCCTTGCCTTGTACTTTC | 1348 | CAGGAAACAGCTATGACCGGCAACTCCCTACTCCA | 1469 |
| AE100s27 | TGTAAAACGACGGCCAGTATGGAACACAGAGGGGTTAGG | 1349 | CAGGAAACAGCTATGACCGTCTGCAAATCCACACT | 1470 |
| AE100s28 | TGTAAAACGACGGCCAGTGGGTTGTATACCACACCCTGG | 1350 | CAGGAAACAGCTATGACCACAGCCAAATTCCTATG | 1471 |
| AE100s29 | TGTAAAACGACGGCCAGTCGAGATAGGAAAGCCAGCTAG | 1351 | CAGGAAACAGCTATGACCGTTCTCCAACCTCTGGT | 1472 |
| AE100s3 | TGTAAAACGACGGCCAGTCACTTGTGGAAAGCACACAGA | 1352 | CAGGAAACAGCTATGACCTGTCAGTGGCCTGAAAT | 1473 |
| AE100s30 | TGTAAAACGACGGCCAGTAGGAAATTTGAGGCCATCACT | 1353 | CAGGAAACAGCTATGACCCCTCCTTCTACCAAGGT | 1474 |
| AE100s4 | TGTAAAACGACGGCCAGTAGCAGTCAAGATCCCTTCCAT | 1354 | CAGGAAACAGCTATGACCGTTTCCTGAACACCTCT | 1475 |
| AE100s5 | TGTAAAACGACGGCCAGTGAAAGAGCCCTCCCTCTCTC | 1355 | CAGGAAACAGCTATGACCTTGCAATGCGGTAGTCT | 1476 |
| AE100s6 | TGTAAAACGACGGCCAGTCAAGGTGGACAGTCTTCGGTA | 1356 | CAGGAAACAGCTATGACCCTGCTGGCATTCCTCAC | 1477 |
| AE100s7 | TGTAAAACGACGGCCAGTTCCTCATAGCAGCCCTATTGA | 1357 | CAGGAAACAGCTATGACCGGACGCCAGATACTTTC | 1478 |
| AE100s8 | TGTAAAACGACGGCCAGTATCCGAAGACAGGGAGTTCAT | 1358 | CAGGAAACAGCTATGACCCTGTTCTTCACTGCCTT | 1479 |
| AE100s9 | TGTAAAACGACGGCCAGTATCCGAAGACAGGGAGTTCAT | 1359 | CAGGAAACAGCTATGACCTGGGGAGTAGGTGTCTG | 1480 |
| AE103s1 | TGTAAAACGACGGCCAGTTCTTTGCCTTCCTGGAATTCT | 1360 | CAGGAAACAGCTATGACCTCAATGCTGTTTTAATT | 1481 |
| AE103s10 | TGTAAAACGACGGCCAGTCGTCCCAGATCTGAACATCAC | 1361 | CAGGAAACAGCTATGACCGACTGCTTGCACCTGGA | 1482 |
| AE103s11 | TGTAAAACGACGGCCAGTGAACCAAGAAGCTTGGCTTTC | 1362 | CAGGAAACAGCTATGACCCTAAATCTGTTTCCCTG | 1483 |
| AE103s12 | TGTAAAACGACGGCCAGTAACTTCCCAGACTCAAGGGAT | 1363 | CAGGAAACAGCTATGACCTCCCTGTATTCCTGGCA | 1484 |
| AE103s13 | TGTAAAACGACGGCCAGTCAAGTGATCCTCCACTTTGGT | 1364 | CAGGAAACAGCTATGACCTGGTGTGTTCATGCAAT | 1485 |
| AE103s14 | TGTAAAACGACGGCCAGTCCTCCACTTTGGTCTCCCATA | 1365 | CAGGAAACAGCTATGACCTGGTGTGTTCATGCAAT | 1486 |
| AE103s2 | TGTAAAACGACGGCCAGTGCTGTAGTCTGCCACTTCCTG | 1366 | CAGGAAACAGCTATGACCGATATTCTCTGCCCAGA | 1487 |
| AE103s3 | TGTAAAACGACGGCCAGTAGGACCAAGGTCTGGGAACT | 1367 | CAGGAAACAGCTATGACCCTGAATTCCTCTGGCCT | 1488 |
| AE103s4 | TGTAAAACGACGGCCAGTGCCTGGAACACAGACCATTAA | 1368 | CAGGAAACAGCTATGACCAAGGCAGATGGATCAGA | 1489 |
| AE103s5 | TGTAAAACGACGGCCAGTAACTTCCCAGACTCAAGGGAT | 1369 | CAGGAAACAGCTATGACCTCCCTGTATTCCTGGCA | 1490 |
| AE103s6 | TGTAAAACGACGGCCAGTCCCTTCTGGGCAGAGAATATC | 1370 | CAGGAAACAGCTATGACCAGTGGTAGGAGGAAACC | 1491 |
| AE103s7 | TGTAAAACGACGGCCAGTCCCTTCTGGGCAGAGAATATC | 1371 | CAGGAAACAGCTATGACCAGTGGTAGGAGGAAACC | 1492 |
| AE103s8 | TGTAAAACGACGGCCAGTGCATCTTCCTGGTGGTGG | 1372 | CAGGAAACAGCTATGACCCTGTGGTCTTGCTATCC | 1493 |
| AE103s9 | TGTAAAACGACGGCCAGTCGTCCCAGATCTGAACATCAC | 1373 | CAGGAAACAGCTATGACCAGAATTCCAGGAAGGCA | 1494 |
| AE104s1 | TGTAAAACGACGGCCAGTGTGGTCTTTAAAGGAGGCCTG | 1374 | CAGGAAACAGCTATGACCGACTTTTGCACCAACCG | 1495 |
| AE104s10 | TGTAAAACGACGGCCAGTGGTCTCAGCACTGTGATCCTC | 1375 | CAGGAAACAGCTATGACCGTGCTACGTACATGTGA | 1496 |
| AE104s11 | TGTAAAACGACGGCCAGTTCGGGAGTTGTAACAAATGCT | 1376 | CAGGAAACAGCTATGACCGAGGCTGTGTTTTGTCA | 1497 |
| AE104s12 | TGTAAAACGACGGCCAGTGCTATGCAAAAACCTCATCCA | 1377 | CAGGAAACAGCTATGACCGAGGCTGTGTTTTGTCA | 1498 |
| AE104s13 | TGTAAAACGACGGCCAGTCATCTACACCATGCATAGGGC | 1378 | CAGGAAACAGCTATGACCTGGAGGAAGAAAACAGG | 1499 |
| AE104s14 | TGTAAAACGACGGCCAGTTAGCCTCTCCAGTTCTAGCCC | 1379 | CAGGAAACAGCTATGACCATTTCTAATCGGTCTTG | 1500 |
| AE104s16 | TGTAAAACGACGGCCAGTAATAAAAGAGGTGCTGACCCAC | 1380 | CAGGAAACAGCTATGACCCTAGAATCATAGGCGCA | 1501 |
| AE104s17 | TGTAAAACGACGGCCAGTCCACCATGACCCAAGTTTAT | 1381 | CAGGAAACAGCTATGACCGCCACTTGTTTCATACT | 1502 |
| AE104s18 | TGTAAAACGACGGCCAGTGAGGAATCCCTTTGACTCACC | 1382 | CAGGAAACAGCTATGACCGACTGAGCAATGTCTGG | 1503 |
| AE104s19 | TGTAAAACGACGGCCAGTTGGTTCCTTCAACTGTTGTCC | 1383 | CAGGAAACAGCTATGACCACAAACGTCCATTGAGT | 1504 |
| AE104s2 | TGTAAAACGACGGCCAGTGTGGTCTTTAAAGGAGGCCTG | 1384 | CAGGAAACAGCTATGACCGACTTTTGCACCAACCG | 1505 |
| AE104s20 | TGTAAAACGACGGCCAGTAGATGTATGGCGGAGGTTTCT | 1385 | CAGGAAACAGCTATGACCGCCACCCATAAACTGAT | 1506 |
| AE104s21 | TGTAAAACGACGGCCAGTTTTTGGATGTAAACAGTGGGC | 1386 | CAGGAAACAGCTATGACCAATGTTTTGAAAGTCCC | 1507 |
| AE104s22 | TGTAAAACGACGGCCAGTGGAAGCCCCATGTGAATAAAT | 1387 | CAGGAAACAGCTATGACCTTGAGCAAAACTGAGAA | 1508 |
| AE104s23 | TGTAAAACGACGGCCAGTACTTCAGTCGCTCCCTGGTAC | 1388 | CAGGAAACAGCTATGACCACATGGAAATCTTCGCA | 1509 |
| AE104s24 | TGTAAAACGACGGCCAGTTCTCCATCTGAATGGGTTCTG | 1389 | CAGGAAACAGCTATGACCACGAGATGCAGAAGTTC | 1510 |
| AE104s25 | TGTAAAACGACGGCCAGTAAGCAACTGTCCCTCAATCCT | 1390 | CAGGAAACAGCTATGACCTAATCACACAGATCGCC | 1511 |
| AE104s26 | TGTAAAACGACGGCCAGTGACCTCCTTGTCCATCAGTGA | 1391 | CAGGAAACAGCTATGACCCCAAGGACTCCAAAATC | 1512 |
| AE104s27 | TGTAAAACGACGGCCAGTCCCTCACAACGACTTCATGTT | 1392 | CAGGAAACAGCTATGACCTCACTGATGGACAAGGA | 1513 |
| AE104s28 | TGTAAAACGACGGCCAGTTTCTCTCCAAATGCTCCTGTG | 1393 | CAGGAAACAGCTATGACCGGGTGATATGGACAGCA | 1514 |
| AE104s29 | TGTAAAACGACGGCCAGTGGTCTCAGCACTGTGATCCTC | 1394 | CAGGAAACAGCTATGACCGTGCTACGTACATGTGA | 1515 |
| AE104s3 | TGTAAAACGACGGCCAGTGCAGGCAAATACCACTTTCAA | 1395 | CAGGAAACAGCTATGACCTTGGATGAAAAAGAGGA | 1516 |
| AE104s30 | TGTAAAACGACGGCCAGTCCCAATACTGATTCTGCTCCA | 1396 | CAGGAAACAGCTATGACCGGAACTCAAAGACTCAA | 1517 |
| AE104s31 | TGTAAAACGACGGCCAGTTGGTTCCTTCAACTGTTGTCC | 1397 | CAGGAAACAGCTATGACCTTGAGTCAGGGACTCAG | 1518 |
| AE104s32 | TGTAAAACGACGGCCAGTCCTGACTCAATGGACGTTTGT | 1398 | CAGGAAACAGCTATGACCAATCCATATTCACACCA | 1519 |
| AE104s33 | TGTAAAACGACGGCCAGTCCTGACTCAATGGACGTTTGT | 1399 | CAGGAAACAGCTATGACCAATCCATATTCACACCA | 1520 |
| AE104s34 | TGTAAAACGACGGCCAGTATCTTCCTCTGCCTCATCACA | 1400 | CAGGAAACAGCTATGACCTATTGCACAACCATCTG | 1521 |
| AE104s35 | TGTAAAACGACGGCCAGTTCAGACTTTGAAGACATGGCC | 1401 | CAGGAAACAGCTATGACCTATTGCACAACCATCTG | 1522 |
| AE104s36 | TGTAAAACGACGGCCAGTTGTACGTAGCACCCTTTGCTT | 1402 | CAGGAAACAGCTATGACCTCACTGATGGACAAGGA | 1523 |
| AE104s4 | TGTAAAACGACGGCCAGTGAATCCCAAAGAGATTGAGGC | 1403 | CAGGAAACAGCTATGACCACAAGCTTGGAGGAAGC | 1524 |
| AE104s5 | TGTAAAACGACGGCCAGTGAATCCCAAAGAGATTGAGGC | 1404 | CAGGAAACAGCTATGACCGACATTCCACAGTTGTG | 1525 |
| AE104s6 | TGTAAAACGACGGCCAGTTGCTTCCTCTTTTTCATCCAA | 1405 | CAGGAAACAGCTATGACCCAGCCTACAGGAAGTGG | 1526 |
| AE104s7 | TGTAAAACGACGGCCAGTGGACCCACAAATCAATGCTT | 1406 | CAGGAAACAGCTATGACCATACCAACAGCTTCCCC | 1527 |
| AE104s8 | TGTAAAACGACGGCCAGTTGCTCCACGGAGCTATTTCTA | 1407 | CAGGAAACAGCTATGACCCAAAGACTCAAGTGGGA | 1528 |
| AE104s9 | TGTAAAACGACGGCCAGTGTGGGAATGACAGGTGGAAG | 1408 | CAGGAAACAGCTATGACCGGGTGATATGGACAGCA | 1529 |
| AE105s1 | TGTAAAACGACGGCCAGTAGAGCATCCTCTCTTACCCCA | 1409 | CAGGAAACAGCTATGACCACTGTACCTGCCCGGTT | 1530 |
| AE105s2 | TGTAAAACGACGGCCAGTAAGCCTGGAAGCTTAGGTCTG | 1410 | CAGGAAACAGCTATGACCTTTGATGCGGGGTAGTG | 1531 |
| AE105s3 | TGTAAAACGACGGCCAGTTATTTTCTAGGTGGGGCAGCT | 1411 | CAGGAAACAGCTATGACCTACCCCTCTAACTTGCA | 1532 |
| AE105s4 | TGTAAAACGACGGCCAGTGAACCACAGGATAGAGCCTCC | 1412 | CAGGAAACAGCTATGACCATCTGTTGGGAGCTGGG | 1533 |
| AE105s5 | TGTAAAACGACGGCCAGTACTACCCAGCTCCCAACAGAT | 1413 | CAGGAAACAGCTATGACCTGGATTGGTGACTCTTA | 1534 |
| AE105s6 | TGTAAAACGACGGCCAGTGGACCCAGATCTTCAGGTTTC | 1414 | CAGGAAACAGCTATGACCAACTGAGAGCTGAGGCT | 1535 |
| AE106s1 | TGTAAAACGACGGCCAGTAGAGTGGCCAATCTTCCACTT | 1415 | CAGGAAACAGCTATGACCGTGGATCATCTTAGCCC | 1536 |
| AE106s2 | TGTAAAACGACGGCCAGTGGCATGGGGAGTCATCTCTAC | 1416 | CAGGAAACAGCTATGACCTGGCAGGAAAAATATGG | 1537 |
| AE106s3 | TGTAAAACGACGGCCAGTCAGATCTGGGTTCCAAAGACA | 1417 | CAGGAAACAGCTATGACCCTGATCTACTTCCTCCC | 1538 |
| AE106s4 | TGTAAAACGACGGCCAGTCTTTTGTTCACCCTGTCAAGC | 1418 | CAGGAAACAGCTATGACCTTGCAAAAAGGGTCAGT | 1539 |
| AE106s5 | TGTAAAACGACGGCCAGTGGCTCCAGGAAAATGAGTCTT | 1419 | CAGGAAACAGCTATGACCTCTGGAACCATCAGAAA | 1540 |
| AE106s6 | TGTAAAACGACGGCCAGTAAAAGCTGGTCCGACCTTTTA | 1420 | CAGGAAACAGCTATGACCTCCAACTGCTCTTCACG | 1541 |
| AE106s7 | TGTAAAACGACGGCCAGTTGAGGGTGTTTCTGATGGTTC | 1421 | CAGGAAACAGCTATGACCATGAAATCCACCCGGTA | 1542 |
| AE106s8 | TGTAAAACGACGGCCAGTATGGATTTCTGGTTCCCTTTG | 1422 | CAGGAAACAGCTATGACCCTTCTTCCTCCTGCCCT | 1543 |
| AE106s9 | TGTAAAACGACGGCCAGTCTTTAAGAGCAAGCGAAGTGG | 1423 | CAGGAAACAGCTATGACCCACACTATGGGCCAGTG | 1544 |
| AE107s1 | TGTAAAACGACGGCCAGTAATTGTATGTGGGGGCAGACT | 1424 | CAGGAAACAGCTATGACCGTGAAGCAGATGCCTGG | 1545 |
| AE107s2 | TGTAAAACGACGGCCAGTCCTGACAGAGCCTGCTGATAC | 1425 | CAGGAAACAGCTATGACCATTTTGAGGTCCACACA | 1546 |
| AE107s3 | TGTAAAACGACGGCCAGTGCCCAGTTTGTTCATGTCAGT | 1426 | CAGGAAACAGCTATGACCGGAAATGAGACTACGAA | 1547 |
| AE107s4 | TGTAAAACGACGGCCAGTCCTGACAGAGCCTGCTGATAC | 1427 | CAGGAAACAGCTATGACCAAGTCTGTCACCTTCTG | 1548 |
| AE107s5 | TGTAAAACGACGGCCAGTCCCTACCCCCAGTAAAATCAA | 1428 | CAGGAAACAGCTATGACCACCTCTCAGCCTCAGAC | 1549 |
| AE107s6 | TGTAAAACGACGGCCAGTGCCGTCAGAGTGCTGTCTTAT | 1429 | CAGGAAACAGCTATGACCCTGTTTGTCTGCACCTG | 1550 |
| AE109s1 | TGTAAAACGACGGCCAGTTGACGAGAGTCAATTGAAAGGA | 1430 | CAGGAAACAGCTATGACCATGCAGACCAAAGCATC | 1551 |
| AE109s2 | TGTAAAACGACGGCCAGTCAAAGTAGTTGAGCAGTGGCC | 1431 | CAGGAAACAGCTATGACCGACCATACAACAATTGG | 1552 |
| AE109s3 | TGTAAAACGACGGCCAGTAAATGGCAGCTGTCACCATAG | 1432 | CAGGAAACAGCTATGACCACATGAATGTAAGGCCA | 1553 |
| AE109s4 | TGTAAAACGACGGCCAGTTCTGCAGAGAAAATAAACCACTGA | 1433 | CAGGAAACAGCTATGACCTCTTCAGCAAAATTTCC | 1554 |
| AE109s5 | TGTAAAACGACGGCCAGTGCATTCTTGTGGATTATCTGGG | 1434 | CAGGAAACAGCTATGACCTCGACAGTGGGGAAACT | 1555 |
| AE109s6 | TGTAAAACGACGGCCAGTTTGCCCATAGTGGTAACTTGC | 1435 | CAGGAAACAGCTATGACCCGAGTGGCTAATTTGAA | 1556 |
| AE109s7 | TGTAAAACGACGGCCAGTGCACACAGGAAGAACACACAA | 1436 | CAGGAAACAGCTATGACCCTCCCCCATGTCTCTCT | 1557 |
| AE109s8 | TGTAAAACGACGGCCAGTGTGCATGCATCTGTGTGTGTT | 1437 | CAGGAAACAGCTATGACCACATGAATGTAAGGCCA | 1558 |
| AE109s9 | TGTAAAACGACGGCCAGTTGCTTTCAAAATGCGATTTCT | 1438 | CAGGAAACAGCTATGACCCTTTCTTCCTGGGCTTT | 1559 |
| AE110s1 | TGTAAAACGACGGCCAGTCAGGCATGTCAGGTTTTGAAT | 1439 | CAGGAAACAGCTATGACCTTGTAATCCATCCGTAG | 1560 |
| AE110s10 | TGTAAAACGACGGCCAGTCTTGCTGTGTTATCCCCAAGA | 1440 | CAGGAAACAGCTATGACCCTCCTGCTTGGAACAGA | 1561 |
| AE110s11 | TGTAAAACGACGGCCAGTAAGAACATCTTTTTCTCCCCG | 1441 | CAGGAAACAGCTATGACCATCCACAATCTTCCCTC | 1562 |
| AE110s12 | TGTAAAACGACGGCCAGTGCAGGTCATGGAAGTGGATTA | 1442 | CAGGAAACAGCTATGACCAGCCATTTAGTTTGACC | 1563 |
| AE110s2 | TGTAAAACGACGGCCAGTGATCTGGAGCGACTGTTTCTG | 1443 | CAGGAAACAGCTATGACCTTTGCCTTGGTTAGGGA | 1564 |
| AE110s3 | TGTAAAACGACGGCCAGTCTTTCAACATCCATTTGTGGG | 1444 | CAGGAAACAGCTATGACCTGACGACTTACTTTGGA | 1565 |
| AE110s4 | TGTAAAACGACGGCCAGTCACAGGAAGCAACCTCTGAAG | 1445 | CAGGAAACAGCTATGACCGGAGCCAGAAATGGAGA | 1566 |
| AE110s5 | TGTAAAACGACGGCCAGTCCTTGCAAAATTCCTGAATGA | 1446 | CAGGAAACAGCTATGACCAGGGTTGCTCAACCCTA | 1567 |
| AE110s6 | TGTAAAACGACGGCCAGTCCTTGTCTGTACGGGGTAACA | 1447 | CAGGAAACAGCTATGACCCCAACAGAGCAGGAAAT | 1568 |
| AE110s7 | TGTAAAACGACGGCCAGTAACGGGTACCAATTCTATCCC | 1448 | CAGGAAACAGCTATGACCCTAGCACATATCCCAGC | 1569 |
| AE110s8 | TGTAAAACGACGGCCAGTGATTTTGGGTGGATAGAAGCC | 1449 | CAGGAAACAGCTATGACCGGTTTACAAACCACTTT | 1570 |
| AE110s9 | TGTAAAACGACGGCCAGTGAAGGGTGCATGCCTGTAGT | 1450 | CAGGAAACAGCTATGACCTAAGTGACCTGCCCAAA | 1571 |

[1481] TABLE XII
Sample Description

| | Cases | | | Controls | | | |
|---|---|---|---|---|---|---|---|
| Race | Angioedema | Angioedema-like | Total | Angioedema | Angioedema-like | Total | Total |
| Blacks | 11 | 10 | 21 | 32 | 19 | 51 | 72 |
| Caucasians | 12 | 22 | 34 | 38 | 69 | 107 | 141 |
| Other | 0 | 1 | 1 | 0 | 1 | 1 | 2 |
| Total | 23 | 33 | 56 | 70 | 89 | 159 | 215 |

[1482] TABLE XIII
Candidate Angioedema Susceptibility Genes

| Chromosome | Gene | Gene ID |
|---|---|---|
| 14 | Bradykinin B2 Receptor | BDKRB2 |
| 19 | Tissue Kallikrein | KLK1 |
| X | Aminopeptidase P (Membrane Bound) | XPNPEP2 |

[1483] TABLE XIV
Association of SNPs of the present invention with Angioedema and/or Angioedema-like Events

| | | | | | | | | Copies | | OR | OR | |
|---|---|---|---|---|---|---|---|---|---|---|---|---|
| | | Sample or | Scores | | | Estimate | | of Rare | Odds Ratio | Lower 95% | Upper 95% | |
| Gene ID | SNP ID | Subgroup | Test | DF | Probability | Type | A, a¹ | Allele | (OR)² | CL | CL | p(a)³ |
| BDKRB2 | AE104s9 | Caucasians | 7.01 | 2 | 0.0300 | Asymptotic | A, T | 1 | 3.41 | 1.3238 | 8.7969 | 0.28 |
| | | | | | 0.0251 | Exact | | | 3.37 | 1.2261 | 10.2718 | |
| KLK1 | AE107s2 | Blacks | 7.50 | 2 | 0.0062 | Asymptotic | C, T | 1 | 5.64 | 1.4211 | 22.3807 | 0.09 |
| | | | | | 0.0062 | Exact | | | 5.64 | 1.2422 | 34.7611 | |
| XPNPEP2 | AE100s4 | Caucasians | 13.44 | 2 | 0.0009 | Exact | C, T | 2 | 14.95 | 1.9838 | +INF | 0.28 |
| | | Angioedema- | 11.39 | 2 | 0.0022 | Exact | | 2 | 10.82 | 1.3105 | +INF | 0.22 |
| | | like | | | | | | | | | | |
| | | Overall | 10.72 | 2 | 0.0047 | Asymptotic | | 2 | 11.11 | 1.2687 | 97.2709 | 0.23 |

¹Most frequent (common) allele, least frequent (rare) allele.
²The ratio of the odds of an adverse event (angioedema and/or Angioedema-like) in subjects carrying the specified number of copies of the rare allele, relative to controls matched for nationality, race, gender and starting dose, over the odds of such an adverse event for similarly matched subjects not carrying any copies of the rare allele.
³Rare allele relative frequency.

What is claimed is:

1.) An isolated nucleic acid derived from a human gene encoding a protein selected from a member of the group consisting of aminopeptidase P protein (XPNPEP2), bradykinin receptor B1 protein (BDKRB1), tachykinin receptor 1 protein (TACR1), C1 esterase inhibitor protein (CINH), kallikrein 1 protein (KLK1), bradykinin receptor B2 protein (BDKRB2), angiotension converting enzyme 2 protein (ACE2), and protease inhibitor 4 protein (PI4), wherein said nucleic acid comprises at least one polymorphic position.

2.) The isolated nucleic acid of claim 1 wherein said at least one polymorphic position for each said gene is a polymorphic position specified in Table V, or complement thereof.

3.) The isolated nucleic acid of claim 2 wherein the sequence at said at least one polymorphic position is depicted in a nucleic acid sequence selected from the group consisting of SEQ ID NO: 163 to 288; 643 to 706; and 910 to 961, and 1574 to 1575, or complement thereof.

4.) The isolated nucleic acid of claim 3 wherein said at least one polymorphic position resides in a non-coding position within the genomic sequence of said gene.

5.) The isolated nucleic acid of claim 3 wherein said at least one polymorphic position resides in a coding position within the genomic sequence of said gene.

6.) The isolated nucleic acid of claim 5 wherein said at least one polymorphic position residing in a coding position results in a missense mutation of the translated product of said gene.

7.) The isolated nucleic acid of claim 5 wherein said at least one polymorphic position residing in a coding position results in a silent mutation of the translated product of said gene.

8.) The isolated nucleic acid of claim 4 wherein said at least one polymorphic position residing in a non-coding position resides within the untranslated region of said gene.

9.) The isolated nucleic acid of claim 4 wherein said at least one polymorphic position residing in a non-coding position resides within an intronic region of said gene.

10.) The isolated nucleic acid of claim 8 wherein said at least one polymorphic position is selected from the group consisting of:
a.) 62738 of the human bradykinin receptor B2 genomic sequence;
b.) 4627 of the human kallikrein 1 genomic sequence; and
c.) 74651 of the human aminopeptidase P genomic sequence.

11.) The isolated nucleic acid of claim 10 wherein said at least one polymorphic position is selected from the group consisting of:
a.) 62738T of the human bradykinin receptor B2 genomic sequence;
b.) 62738A of the human bradykinin receptor B2 genomic sequence;
c.) 4627C of the human kallikrein I genomic sequence;
d.) 4627T of the human kallikrein 1 genomic sequence;
e.) 74651C of the human aminopeptidase P genomic sequence; and
f.) 7465 IT of the human aminopeptidase P genomic sequence.

12.) The isolated nucleic acid molecule according to claim 11, wherein asid nucleic acid sequence is at least 30 nucleotides in length.

13.) The isolated nucleic acid molecule according to claim 11, wherein said nucleic acid sequence is at least 40 nucleotides in length.

14.) A probe that hybridizes to a polymorphic position defined in claim 2.

15.) The probe of claim 14 wherein said probe is at least 15 nucleotides in length.

16.) The probe of claim 15 wherein a central position of the probe aligns with said polymorphic position.

17.) The probe of claim 15 wherein the 3′ end of the primer aligns with said polymorphic position.

18.) A method of analyzing at least one nucleic acid sample, comprising the steps of (1) obtaining said nucleic acid sample from one or more individuals; and (2) determining the nucleic acid sequence at one or more polymorphic positions in a gene encoding a protein selected from the group consisting of aminopeptidase P protein (XPNPEP2), bradykinin receptor B1 protein (BDKRB1), tachykinin receptor 1 protein (TACR1), C1 esterase inhibitor protein (C1NH), kallikrein 1 protein (KLK1), bradykinin receptor B2 protein (BDKRB2), angiotension converting enzyme 2 protein (ACE2), and protease inhibitor 4 protein (PI4).

19.) The method according to claim 18, further comprising the steps of (3) testing each individual for the presence of a disease phenotype; and (4) correlating the presence of the disease phenotype with the sequence at said one or more polymorphic positions.

20.) The method according to claim 19, wherein said one or more polymorphic position of said nucleic acid sequence is a polymorphic position specified in Table V for said gene.

21.) The method according to claim 20, wherein the nucleic acid sequence at said one or more polymorphic position is depicted in a nucleic acid sequence selected from the group consisting of SEQ ID NO: 163 to 288; 643 to 706; and 910 to 961, and 1574 to 1575, or complement thereof.

22.) A method of constructing haplotypes using the isolated nucleic acids of claim 1, comprising the step of grouping at least two said nucleic acids.

23.) The method according to claim 22 further comprising the step of using said haplotypes to identify an individual for the presence of a disease phenotype, and correlating the presence of the disease phenotype with said haplotype.

24.) The method according to claim 19 further comprising the step of quantifying the nucleic acid sample comprising the polymorphic base.

25) The method according to claim 21 or 23 wherein the disease phenotype is angioedema or an angioedema-like disorder.

26) The method according to claim 25 wherein the polymorphic position is a member of the group consisting of:
a.) 62738 of the human bradykinin receptor B2 genomic sequence;
b.) 4627 of the human kallikrein 1 genomic sequence; and
c.) 74651 of the human aminopeptidase P genomic sequence.

27) The isolated nucleic acid of claim 26 wherein the sequence at the polymorphic position is a member of the group consisting of:
a.) 62738T of the human bradykinin receptor B2 genomic sequence;
b.) 62738A of the human bradykinin receptor B2 genomic sequence;
c.) 4627C of the human kallikrein 1 genomic sequence;
d.) 4627T of the human kallikrein 1 genomic sequence;
e.) 74651C of the human aminopeptidase P genomic sequence; and
f.) 74651T of the human aminopeptidase P genomic sequence.

28) A method for identifying an individual at risk of developing a disorder upon administration of a pharmaceutically acceptable amount of an ACE inhibitor and/or vasopeptidase inhibitor comprising the steps of
a.) obtaining nucleic acid sample(s) from said individual;
b.) amplifying one or more sequences from said sample(s) using appropriate PCR primers for amplifying across at least one polymorphic position;
c.) comparing said at least one polymorphic position with a known data set; and
d.) determining whether the result correlates with an increased or decreased risk for developing a disorder.

29) The method according to claim 28 wherein said at least one polymorphic position is selected from the group consisting of:
a.) 62738 of the human bradykinin receptor B2 genomic sequence;
b.) 4627 of the human kallikrein 1 genomic sequence; and
c.) 74651 of the human aminopeptidase P genomic sequence.

30) The isolated nucleic acid of claim 29 wherein said at least one polymorphic position is selected from the group consisting of:
a.) 62738T of the human bradykinin receptor B2 genomic sequence;
b.) 62738A of the human bradykinin receptor B2 genomic sequence;
c.) 4627C of the human kallikrein 1 genomic sequence;
d.) 4627T of the human kallikrein 1 genomic sequence;
e.) 74651C of the human aminopeptidase P genomic sequence; and
f.) 74651T of the human aminopeptidase P genomic sequence.

31) The method of claim 30 wherein the disorder is angioedema or an angioedema-like disorder.

32) A library of nucleic acids, each of which comprises one or more polymorphic positions within a gene encoding a human protein selected from the group consisting of aminopeptidase P protein (XPNPEP2), bradykinin receptor B1 protein (BDKRB1), tachykinin receptor 1 protein (TACR1), C1 esterase inhibitor protein (C1NH), kallikrein 1 protein (KLK1), bradykinin receptor B2 protein (BDKRB2), angiotension converting enzyme 2 protein (ACE2), and protease inhibitor 4 protein (PI4), wherein said polymorphic positions are selected from a group consisting of the polymorphic positions provided in Table V.

33) The library of nucleic acids of claim 32 wherein the sequence at said polymorphic position is selected from the group consisting of the sequences provided in Table V.

34) The library according to claim 33 wherein the polymorphic position is a member of the group consisting of:
a.) 62738 of the human bradykinin receptor B2 genomic sequence;
b.) 4627 of the human kallikrein 1 genomic sequence; and
c.) 74651 of the human aminopeptidase P genomic sequence.

35) The library according to claim 34 wherein the sequence at the polymorphic position is a member of the group consisting of:
a.) 62738T of the human bradykinin receptor B2 genomic sequence;
b.) 62738A of the human bradykinin receptor B2 genomic sequence;
c.) 4627C of the human kallikrein 1 genomic sequence;
d.) 4627T of the human kallikrein 1 genomic sequence;
e.) 74651C of the human aminopeptidase P genomic sequence; and
f.) 74651T of the human aminopeptidase P genomic sequence.

36) The library according to claim 35 wherein said library of isolated sequences represents the complimentary sequence of said sequences.

37) A kit for identifying an individual at risk of developing a disorder upon administration of a pharmaceutically acceptable amount of an ACE inhibitor and/or vasopeptidase inhibitor, said kit comprising
i.) sequencing primers, and
ii.) sequencing reagents,
wherein said primers are primers that hybridize to at least one polymorphic position in a human gene selected from the group consisting of aminopeptidase P protein (XPNPEP2), bradykinin receptor B1 protein (BDKRB1), tachykinin receptor 1 protein (TACR1), C1 esterase inhibitor protein (CINH), kallikrein 1 protein (KLK1), bradykinin receptor B2 protein (BDKRB2), angiotension converting enzyme 2 protein (ACE2), and protease inhibitor 4 protein (PI4).

38) The kit according to claim 37 wherein said polymorphic positions are selected from a group consisting of the polymorphic positions provided in Table V.

39) The kit according to claim 38 wherein the polymorphic position is a member of the group consisting of:
a.) 62738 of the human bradykinin receptor B2 genomic sequence;
b.) 4627 of the human kallikrein 1 genomic sequence; and
c.) 74651 of the human aminopeptidase P genomic sequence.

40) The kit according to claim 39 wherein the sequence at the polymorphic position is a member of the group consisting of:
a.) 62738T of the human bradykinin receptor B2 genomic sequence;
b.) 62738A of the human bradykinin receptor B2 genomic sequence;
c.) 4627C of the human kallikrein 1 genomic sequence;
d.) 4627T of the human kallikrein 1 genomic sequence;
e.) 74651C of the human aminopeptidase P genomic sequence; and
f.) 74651T of the human aminopeptidase P genomic sequence.

41) The kit according to claim 40 wherein said primer(s) hybridizes immediately adjacent to said polymorphic positions.

42) The kit according to claim 41 wherein said primer(s) hybridizes to said polymorphic positions such that the central position of the primer aligns with the polymorphic position of said gene.

43) The method according to claim 28 further comprising the step of subjecting the product(s) of said amplification to a genetic bit analysis (GBA) reaction.

44) A method for identifying an individual at risk of developing a disorder upon administration of a pharmaceutically acceptable amount of an ACE inhibitor and/or vasopeptidase inhibitor comprising the steps of
a.) obtaining a nucleic acid sample(s) from said individual;
b.) determining the nucleotide present at least one polymorphic position,
c.) comparing said at least one polymorphic position with a known data set; and
d.) determining whether the result correlates with an increased or decreased risk for developing a disorder.

45) The method according to claim 44 wherein said at least one polymorphic position is selected from the group consisting of:
a.) 62738 of the human bradykinin receptor B2 genomic sequence;
b.) 4627 of the human kallikrein 1 genomic sequence; and
c.) 74651 of the human aminopeptidase P genomic sequence.

46) The isolated nucleic acid of claim 45 wherein said at least one polymorphic position is selected from the group consisting of:
a.) 62738T of the human bradykinin receptor B2 genomic sequence;
b.) 62738A of the human bradykinin receptor B2 genomic sequence;
c.) 4627C of the human kallikrein 1 genomic sequence;
d.) 4627T of the human kallikrein 1 genomic sequence;
e.) 74651C of the human aminopeptidase P genomic sequence; and
f.) 74651T of the human aminopeptidase P genomic sequence.

47) The method of claim 46 wherein the disorder is angioedema or an angioedema-like disorder.

48) A method for genotyping an individual comprising the steps of
a.) obtaining a nucleic acid sample(s) from said individual;
b.) determining the nucleotide present at least one polymorphic position, and
c.) comparing said at least one polymorphic position with a known data set.

49) The method according to claim 48 wherein said at least one polymorphic position is selected from the group consisting of:
a.) 62738 of the human bradykinin receptor B2 genomic sequence;
b.) 4627 of the human kallikrein 1 genomic sequence; and
c.) 74651 of the human aminopeptidase P genomic sequence.

50) The isolated nucleic acid of claim 49 wherein said at least one polymorphic position is selected from the group consisting of:
a.) 62738T of the human bradykinin receptor B2 genomic sequence;
b.) 62738A of the human bradykinin receptor B2 genomic sequence;
c.) 4627C of the human kallikrein 1 genomic sequence;
d.) 4627T of the human kallikrein 1 genomic sequence;
e.) 74651C of the human aminopeptidase P genomic sequence; and
f.) 74651T of the human aminopeptidase P genomic sequence.

The application's sequence listing, which the Patent Office published only in electronic form, follows.

SEQUENCE LISTING (1579 sequences)

SEQ ID NO: 1 - DNA, 3428 bp, homo sapiens
  CDS (265)..(2283)
caccctatcctacactactaggaacttgcacagtccgcctcgggcagcccaaagctcctctgcccaccctggctcccaaaaccctccaaaacaaaagaccagaaaagcactctccacccagcagccaaacgcctccttcttgacgccagcccccaccctctgtctgctcgagcccaggaaaggcctgaaggaacaggccggggaaggagccctccctctctcccttgtccctccatccacccagcgccggcatctggagaccctatggcccgggctcactggggctgctgcccctggctggtcctcctctgtgcttgtgcctggggccacacaaagccactggaccttggagggcaggatgtgagaaattgttccaccaaccccccttaccttccagttactgtggtcaataccacaatgtcactcacagccctccgccagcagatgcagacccagaatctctcagcctacatcatcccaggcacagatgctcacatgaacgagtacatcggccaacatgacgagaggcgtgcgtggattacaggctttacagggtctgcaggaactgcagtggtgactatgaagaaagcagctgtctggaccgacagtcgctactggactcaggctgagcggcaaatggactgtaattgggagctccataaggaagttggcaccactcctattgtcacctggctcctcaccgagattcccgctggagggcgtgtgggttttgaccccttcctcttgtccattgacacctgggagagttatgatctggccctccaaggctctaacagacagctggtgtccatcacaaccaatcttgtggacctggtatggggatcagagaggccaccggttccaaatcaacccatttatgccctgcaggaggcattcacagggagcacttggcaggagaaagtatctggcgtccgaagccagatgcagaagcatcaaaaggtcccgactgccgtccttctgtcggcgcttgaggagacggcctggctcttcaaccttcgagccagtgacatcccctataaccccttcttctattcctacacgctgctcacagactcttctattaggttgtttgcaaacaagagtcgctttagctccgaaaccttgagctatctgaactccagttgcacaggccccatgtgtgtgcaaatcgaggattacagccaagttcgtgacagcatccaggcctactcattgggagatgtgaggatctggattgggaccagctataccatgtatgggatctatgaaatgataccaagggagaaactcgtgacagacacctactccccagtgatgatgaccaaggcagtgaagaacagcaaggagcaggccctcctcaaggccagccacgtgcgggacgctgtggctgtgatccggtacttggtctggctggagaagaacgtgcccaaaggcacagtggatgagttttcgggggcagagatcgtggacaagttccgaggagaagaacagttctcctccggacccagttttgaaaccatctctgctagtggtttgaatgctgccctggcccactacagcccgaccaaggagctgaaccgcaagctgtcctcagatgagatgtacctgctggactctggggggcagtactgggacgggaccacagacatcaccagaacagtccactggggcaccccctctgcctttcagaaggaggcatatacccgtgtgctgataggaaatattgacctgtccaggctcatctttcccgctgctacatcagggcgaatggtggaggcctttgcccgcagagccttgtgggatgctggtctcaattatggtcatgggacaggccacggcattggcaacttcctgtgtgtgcatgagtggccagtgggattccagtccaacaacatcgctatggccaagggcatgttcacttccattgaacctggttactataaggatggagaatttgggatccgtctcgaagatgtggctctcgtggtagaagcaaagaccaagtacccaggggagctacctgaccttgtggtatcatttgtgccctatgaccggaacctcatcgatgtcagcctgctgtctcccgagcatctccagtacctgaatcgctactaccagaccatccgggagaaggtgggtccagagctgcagaggcgccagctactagaggagttcgagtggcttcaacagcacacagagcccctggccgccagggccccagacaccgcctcctgggcctctgtgttagtggtctccacccttgccatccttggctggagtgtctagaggctccagactctcctgttaaccctccatctagatggggggctcccttgcttagctcccctcaccctgcactgaacataccccaagagcccctgctggcccattgcctagaaacctttgcattcatcctccttctccaagacctatggagaaggtcccaggccccaggaaacacagggcttcttggccccagatggcacctccctgcaccccggggttgtataccacaccctgggcccctaatcccaggccccgaaataggaaagccagctagtctcttctcttctgtgatctcagtaggcctaacctataacctaacacagactgctacagctgctcccctcccgccaaacaaagccccaagaaaacaatgcccctaccacccaagggtgccatggtcccgggaaaacccaacctgtcaccgcgtgttgggcgtaaccagaactgttcccccccaccagggcttaaaaatcgcccccactttttaaccatcgtccattaaccacctggtgggcatagccagagctgttcgaacccagccagggatgaaaaatcaacccccgacatggaacccatgattcctaaacccggggtaggttccatgccaagtaacagcagagggagttaagccataggaatttggctgtggagtaagagggaatgcggtgaggcagtgtggaatatgaccctaccagaggttggagaacaaacttgggcagccggaacccgtcactattttagattcctggcattcgaggagccctttgaactttccaaagtgcagccacagctacaatgctgttaaatcctcccacatttcttggatgccccttcaccttgtgtggacagtgtctggtttccccattttacagacaggaaaactgagcttcagacagggggtgggctttgcctaaggacacacaaatttggttgggagttgatggggccagatgagccagcattccagctgtttcacccttcagcaacatgcagagtccctgagcccacctcccagccctctcctcattctctgaacccactgtggtgagaagaatttgctccggccaaattggccgttagccacctgggtccacatcctgctaagacgtttaaaacagcctaacaaagacacttgcctgtgg

SEQ ID NO: 2 - protein, 673 aa, homo sapiens
MARAHWGCCPWLVLLCACAWGHTKPLDLGGQDVRNCSTNPPYLPVTVVNTTMSLTALRQQMQTQNLSAYIIPGTDAHMNEYIGQHDERRAWITGFTGSAGTAVVTMKKAAVWTDSRYWTQAERQMDCNWELHKEVGTTPIVTWLLTEIPAGGRVGFDPFLLSIDTWESYDLALQGSNRQLVSITTNLVDLVWGSERPPVPNQPIYALQEAFTGSTWQEKVSGVRSQMQKHQKVPTAVLLSALEETAWLFNLRASDIPYNPFFYSYTLLTDSSIRLFANKSRFSSETLSYLNSSCTGPMCVQIEDYSQVRDSIQAYSLGDVRIWIGTSYTMYGIYEMIPREKLVTDTYSPVMMTKAVKNSKEQALLKASHVRDAVAVIRYLVWLEKNVPKGTVDEFSGAEIVDKFRGEEQFSSGPSFETISASGLNAALAHYSPTKELNRKLSSDEMYLLDSGGQYWDGTTDITRTVHWGTPSAFQKEAYTRVLIGNIDLSRLIFPAATSGRMVEAFARRALWDAGLNYGHGTGHGIGNFLCVHEWPVGFQSNNIAMAKGMFTSIEPGYYKDGEFGIRLEDVALVVEAKTKYPGELPDLVVSFVPYDRNLIDVSLLSPEHLQYLNRYYQTIREKVGPELQRRQLLEEFEWLQQHTEPLAARAPDTASWASVLVVSTLAILGWSV

SEQ ID NO: 3 - DNA, 3428 bp, homo sapiens
  CDS (265)..(2283)
caccctatcctacactactaggaacttgcacagtccgcctcgggcagcccaaagctcctctgcccaccctggctcccaaaaccctccaaaacaaaagaccagaaaagcactctccacccagcagccaaacgcctccttcttgacgccagcccccaccctctgtctgctcgagcccaggaaaggcctgaaggaacaggccggggaaggagccctccctctctcccttgtccctccatccacccagcgccggcatctggagaccctatggcccgggctcactggggctgctgcccctggctggtcctcctctgtgcttgtgcctggggccacacaaagccactggaccttggagggcaggatgtgagaaattgttccaccaaccccccttaccttccagttactgtggtcaataccacaatgtcactcacagccctccgccagcagatgcagacccagaatctctcagcctacatcatcccaggcacagatgctcacatgaacgagtacatcggccaacatgacgagaggcgtgcgtggattacaggctttacagggtctgcaggaactgcagtggtgactatgaagaaagcagctgtctggaccgacagtcgctactggactcaggctgagcggcaaatggactgtaattgggagctccataaggaagttggcaccactcctattgtcacctggctcctcaccgagattcccgctggagggcgtgtgggttttgaccccttcctcttgtccattgacacctgggagagttatgatctggccctccaaggctctaacagacagctggtgtccatcacaaccaatcttgtggacctggtatggggatcagagaggccaccggttccaaatcaacccatttatgccctgcaggaggcattcacagggagcacttggcaggagaaagtatctggcgtccgaagccagatgcagaagcatcaaaaggtcccgactgccgtccttctgtcggcgcttgaggagacggcctggctcttcaaccttcgagccagtgacatcccctataaccccttcttctattcctacacgctgctcacagactcttctattaggttgtttgcaaacaagagtcgctttagctccgaaaccttgagctatctgaactccagttgcacaggccccatgtgtgtgcaaatcgaggattacagccaagttcgtgacagcatccaggcctactcattgggagatgtgaggatctggattgggaccagctataccatgtatgggatctatgaaatgataccaagggagaaactcgtgacagacacctactccccagtgatgatgaccaaggcagtgaagaacagcaaggagcaggccctcctcaaggccagccacgtgcgggacgctgtggctgtgatccggtacttggtctggctggagaagaacgtgcccaaaggcacagtggatgagttttcgggggcagagatcgtggacaagttccgaggagaagaacagttctcctccggacccagttttgaaaccatctctgctagtggtttgaatgctgccctggcccactacagcccgaccaaggagctgaaccgcaagctgtcctcagatgagatgtacctgctggactctggggggcagtactgggacgggaccacagacatcaccagaacagtccactggggcaccccctctgcctttcagaaggaggcatatacccgtgtgctgataggaaatattgacctgtccaggctcatctttcccgctgctacatcagggcgaatggtggaggcctttgcccgcagagccttgtgggatgctggtctcaattatggtcatgggacaggccacggcattggcaacttcctgtgtgtgcatgagtggccagtgggattccagtccaacaacatcgctatggccaagggcatgttcacttccattgaacctggttactataaggatggagaatttgggatccgtctcgaagatgtggctctcgtggtagaagcaaagaccaagtacccaggggagctacctgaccttgtggtatcatttgtgccctatgaccggaacctcatcgatgtcagcctgctgtctccggagcatctccagtacctgaatcgctactaccagaccatccgggagaaggtgggtccagagctgcagaggcgccagctactagaggagttcgagtggcttcaacagcacacagagcccctggccgccagggccccagacaccgcctcctgggcctctgtgttagtggtctccacccttgccatccttggctggagtgtctagaggctccagactctcctgttaaccctccatctagatggggggctcccttgcttagctcccctcaccctgcactgaacataccccaagagcccctgctggcccattgcctagaaacctttgcattcatcctccttctccaagacctatggagaaggtcccaggccccaggaaacacagggcttcttggccccagatggcacctccctgcaccccggggttgtataccacaccctgggcccctaatcccaggccccgaaataggaaagccagctagtctcttctcttctgtgatctcagtaggcctaacctataacctaacacagactgctacagctgctcccctcccgccaaacaaagccccaagaaaacaatgcccctaccacccaagggtgccatggtcccgggaaaacccaacctgtcaccgcgtgttgggcgtaaccagaactgttcccccccaccagggcttaaaaatcgcccccactttttaaccatcgtccattaaccacctggtgggcatagccagagctgttcgaacccagccagggatgaaaaatcaacccccgacatggaacccatgattcctaaacccggggtaggttccatgccaagtaacagcagagggagttaagccataggaatttggctgtggagtaagagggaatgcggtgaggcagtgtggaatatgaccctaccagaggttggagaacaaacttgggcagccggaacccgtcactattttagattcctggcattcgaggagccctttgaactttccaaagtgcagccacagctacaatgctgttaaatcctcccacatttcttggatgccccttcaccttgtgtggacagtgtctggtttccccattttacagacaggaaaactgagcttcagacagggggtgggctttgcctaaggacacacaaatttggttgggagttgatggggccagatgagccagcattccagctgtttcacccttcagcaacatgcagagtccctgagcccacctcccagccctctcctcattctctgaacccactgtggtgagaagaatttgctccggccaaattggccgttagccacctgggtccacatcctgctaagacgtttaaaacagcctaacaaagacacttgcctgtgg

SEQ ID NO: 4 - protein, 673 aa, homo sapiens; identical to SEQ ID NO: 2

SEQ ID NO: 5 - DNA, 1082 bp, homo sapiens
  CDS (7)..(1065)
ctgtgcatggcatcatcctggccccctctagagctccaatcctccaaccagagccagctcttccctcaaaatgctacggcctgtgacaatgctccagaagcctgggacctgctgcacagagtgctgccgacatttatcatctccatctgtttcttcggcctcctagggaacctttttgtcctgttggtcttcctcctgccccggcggcaactgaacgtggcagaaatctacctggccaacctggcagcctctgatctggtgtttgtcttgggcttgcccttctgggcagagaatatctggaaccagtttaactggcctttcggagccctcctctgccgtgtcatcaacggggtcatcaaggccaatttgttcatcagcatcttcctggtggtggccatcagccaggaccgctaccgcgtgctggtgcaccctatggccagcggaaggcagcagcggcggaggcaggcccgggtcacctgcgtgctcatctgggttgtggggggcctcttgagcatccccacattcctgctgcgatccatccaagccgtcccagatctgaacatcaccgcctgcatcctgctcctcccccatgaggcctggcactttgcaaggattgtggagttaaatattctgggtttcctcctaccactggctgcgatcgtcttcttcaactaccacatcctggcctccctgcgaacgcgggaggaggtcagcaggacaagagtgcgggggccgaaggatagcaagaccacagcgctgatcctcacgctcgtggttgccttcctggtctgctgggccccttaccacttctttgccttcctggaattcttattccaggtgcaagcagtccgaggctgcttttgggaggacttcattgacctgggcctgcaattggccaacttctttgccttcactaacagctccctgaatccagtaatttatgtctttgtgggccggctcttcaggaccaaggtctgggaactttataaacaatgcacccctaaaagtcttgctccaatatcttcatcccataggaaagaaatcttccaacttttctggcggaattaaaacagcattgaacc

SEQ ID NO: 6 - protein, 353 aa, homo sapiens
MASSWPPLELQSSNQSQLFPQNATACDNAPEAWDLLHRVLPTFIISICFFGLLGNLFVLLVFLLPRRQLNVAEIYLANLAASDLVFVLGLPFWAENIWNQFNWPFGALLCRVINGVIKANLFISIFLVVAISQDRYRVLVHPMASGRQQRRRQARVTCVLIWVVGGLLSIPTFLLRSIQAVPDLNITACILLLPHEAWHFARIVELNILGFLLPLAAIVFFNYHILASLRTREEVSRTRVRGPKDSKTTALILTLVVAFLVCWAPYHFFAFLEFLFQVQAVRGCFWEDFIDLGLQLANFFAFTNSSLNPVIYVFVGRLFRTKVWELYKQCTPKSLAPISSSHRKEIFQLFWRN

SEQ ID NO: 7 - DNA, 1082 bp, homo sapiens
  CDS (7)..(1065)
ctgtgcatggcatcatcctggccccctctagagctccaatcctccaaccagagccagctcttccctcaaaatgctacggcctgtgacaatgctccagaagcctgggacctgctgcacagagtgctgccgacatttatcatctccatctgtttcttcggcctcctagggaacctttttgtcctgttggtcttcctcctgccccggcggcaactgaacgtggcagaaatctacctggccaacctggcagcctctgatctggtgtttgtcttgggcttgcccttctgggcagagaatatctggaaccagtttaactggcctttcggagccctcctctgccgtgtcatcaacggggtcatcaaggccaatttgttcatcagcatcttcctggtggtggccatcagccaggaccgctaccgcgtgctggtgcaccctatggccagcggaaggcagcagcggcggaggcaggcccgggtcacctgcgtgctcatctgggttgtggggggcctcttgagcatccccacattcctgctgcgatccatccaagccgtcccagatctgaacatcaccgcctgcatcctgctcctcccccatgaggcctggcactttgcaaggattgtggagttaaatattctgggtttcctcctaccactggctgcgatcgtcttcttcaactaccacatcctggcctccctgcgaacgcgggaggaggtcagcaggacaagagtgcgggggccgaaggatagcaagaccacagcgctgatcctcacgctcgtggttgccttcctggtctgctgggccccttaccacttctttgccttcctggaattcttattccaggtgcaagcagtccgaggctgcttttgggaggacttcattgacctgggcctgcaattggccaacttctttgccttcactaacagctccctgaatccagtaatttatgtctttgtgggccagctcttcaggaccaaggtctgggaactttataaacaatgcacccctaaaagtcttgctccaatatcttcatcccataggaaagaaatcttccaacttttctggcggaattaaaacagcattgaacc

SEQ ID NO: 8 - protein, 353 aa, homo sapiens
MASSWPPLELQSSNQSQLFPQNATACDNAPEAWDLLHRVLPTFIISICFFGLLGNLFVLLVFLLPRRQLNVAEIYLANLAASDLVFVLGLPFWAENIWNQFNWPFGALLCRVINGVIKANLFISIFLVVAISQDRYRVLVHPMASGRQQRRRQARVTCVLIWVVGGLLSIPTFLLRSIQAVPDLNITACILLLPHEAWHFARIVELNILGFLLPLAAIVFFNYHILASLRTREEVSRTRVRGPKDSKTTALILTLVVAFLVCWAPYHFFAFLEFLFQVQAVRGCFWEDFIDLGLQLANFFAFTNSSLNPVIYVFVGQLFRTKVWELYKQCTPKSLAPISSSHRKEIFQLFWRN

SEQ ID NO: 9 - DNA, 1082 bp, homo sapiens
  CDS (7)..(1065)
ctgtgcatggcatcatcctggccccctctagagctccaatcctccaaccagagccagctcttccctcaaaatgctacggcctgtgacaatgctccagaagcctgggacctgctgcacagagtgctgccaacatttatcatctccatctgtttcttcggcctcctagggaacctttttgtcctgttggtcttcctcctgccccggcggcaactgaacgtggcagaaatctacctggccaacctggcagcctctgatctggtgtttgtcttgggcttgcccttctgggcagagaatatctggaaccagtttaactggcctttcggagccctcctctgccgtgtcatcaacggggtcatcaaggccaatttgttcatcagcatcttcctggtggtggccatcagccaggaccgctaccgcgtgctggtgcaccctatggccagcggaaggcagcagcggcggaggcaggcccgggtcacctgcgtgctcatctgggttgtggggggcctcttgagcatccccacattcctgctgcgatccatccaagccgtcccagatctgaacatcaccgcctgcatcctgctcctcccccatgaggcctggcactttgcaaggattgtggagttaaatattctgggtttcctcctaccactggctgcgatcgtcttcttcaactaccacatcctggcctccctgcgaacgcgggaggaggtcagcaggacaagagtgcgggggccgaaggatagcaagaccacagcgctgatcctcacgctcgtggttgccttcctggtctgctgggccccttaccacttctttgccttcctggaattcttattccaggtgcaagcagtccgaggctgcttttgggaggacttcattgacctgggcctgcaattggccaacttctttgccttcactaacagctccctgaatccagtaatttatgtctttgtgggccggctcttcaggaccaaggtctgggaactttataaacaatgcacccctaaaagtcttgctccaatatcttcatcccataggaaagaaatcttccaacttttctggcggaattaaaacagcattgaacc

SEQ ID NO: 10 - protein, 353 aa, homo sapiens; identical to SEQ ID NO: 6

SEQ ID NO: 11 - DNA, 3733 bp, homo sapiens
  CDS (1)..(1173)
atgttctctccctggaagatatcaatgtttctgtctgttcgtgaggactccgtgcccaccacggcctctttcagcgccgacatgctcaatgtcaccttgcaagggcccactcttaacgggacctttgcccagagcaaatgcccccaagtggagtggctgggctggctcaacaccatccagccccccttcctctgggtgctgttcgtgctggccaccctagagaacatctttgtcctcagcgtcttctgcctgcacaagagcagctgcacggtggcagagatctacctggggaacctggccgcagcagacctgatcctggcctgcgggctgcccttctgggccatcaccatctccaacaacttcgactggctctttggggagacgctctgccgcgtggtgaatgccattatctccatgaacctgtacagcagcatctgtttcctgatgctggtgagcatcgaccgctacctggccctggtgaaaaccatgtccatgggccggatgcgcggcgtgcgctgggccaagctctacagcttggtgatctgggggtgtacgctgctcctgagctcacccatgctggtgttccggaccatgaaggagtacagcgatgagggccacaacgtcaccgcttgtgtcatcagctacccatccctcatctgggaagtgttcaccaacatgctcctgaatgtcgtgggcttcctgctgcccctgagtgtcatcaccttctgcacgatgcagatcatgcaggtgctgcggaacaacgagatgcagaagttcaaggagatccagacggagaggagggccacggtgctagtcctggttgtgctgctgctattcatcatctgctggctgcccttccagatcagcaccttcctggatacgctgcatcgcctcggcatcctctccagctgccaggacgagcgcatcatcgatgtaatcacacagatcgcctccttcatggcctacagcaacagctgcctcaacccactggtgtacgtgatcgtgggcaagcgcttccgaaagaagtcttgggaggtgtaccagggagtgtgccagaaagggggctgcaggtcagaacccattcagatggagaactccatgggcacactgcggacctccatctccgtggaacgccagattcacaaactgcaggactgggcagggagcagacagtgagcaaacgccagcagggctgctgtgaatttgtgtaaggattgagggacagttgcttttcagcatgggcccaggaatgccaaggagacatctatgcacgaccttgggaaatgagttgatgtctccggtaaaacaccggagactaattcctgccctgcccaattttgcagggagcatggctgtgaggatggggtgaactcacgcacagccaaggactccaaaatcacaacagcattactgttcttatttgctgccacacctgagccagcctgctccttcccaggagtggaggaggcctggggggagggagaggagtgactgagcttccctcccgtgtgttctccgtccctgccccagcaagacaacttagatctccaggagaactgccatccagctttggtgcaatggctgagtgcacaagtgagttgttgccctgggtttctttaatctattcagctagaactttgaaggacaatttcttgcattaataaaggttaagccctgaggggtccctgataacaacctggagaccaggattttatggctcccctcactgatggacaaggaggtctgtgccaaagaagaatccaataagcacatattgagcacttgctgtatatgcagtattgagcactgtaggcaagacccaagaaagagaaggagccatctccatcttgaaggaactcaaagactcaagtgggaacgactgggcactgccaccaccagaaagctgttcgacgagacggtcgagcagggtgctgtgggtgatatggacagcagaagggggagaccaaggttccagctcaaccaataactattgcacaaccacctgtccctgcctcagttcccttttatgtaacatgaagtcgttgtgagggttaaaggcagtaacaggtataaagtacttagaaaagcaaagggtgctacgtacatgtgaggcatcattacgcagacgtaactgggatatgtttactataaggaaaagacactgaggtctagaaatagctccgtggagcagaatcagtattgggagccggtggcggtgtgaagcaccagtgtctggcacacagtaggtgctcattggctcccttccacctgtcattcccaccaccctgaggccccaaccgccacacacacaggagcatttggagagaaggccatgtcttcaaagtctgatttgtgatgaggcagaggaagatatttctaatcggtcttgcccagaggatcacagtgctgagaccccccaccaccagccggtacctgggaagggggagagtgcaggcctgctcagggactgttcctgtctcagcaaccaagggattgttcctgtcaatcaatggtttattggaaggtggcccagtatgagccctagaagagtgtgaaaaggaatggcaatggtgttcaccatcggcagtgccagggcagcactcattcacttgataaatgaatatttattagctggttggagagctagaacctggagagctagaacctggagaactagaacctggagggctagaacctggagaggctagaaccaagaagggctagaacctggaggggctagaacctagagaagctaaaacctgagctagaagctggaggactagaacctggagggctggaatctgaagggctagaacctggagggctggaatctggagagctagaacctggagggctagaacctggagggctagaacctagaagggctagaacctggagggctggaatctggagagctagaacctggagggctagaacctggagggctagaacctagaagggctagaacctggagggctagaacctggcaggttagaacctagaagggctagaacctggagagccagaacctggagggctagaacctggaagggctagaacctgtagagctagaacatggagagctagaacccggcaggctagaacctggcaagctagaacctggagggaatgaacctggagggctagaacctggagaatgagaaaaatttacatggcaaagagcccataaatcctgaccaatccaactctgaattttaaagcaaaagcgtgaaaaaaaagattccctccttacccccaacccactcttttttcccaccacccactctcctctgcctcagtaagtatctggaggaagaaaacaggtgaaagaagaagtaaaaaccatttagtattagtattagaatgaagtcaaactgtgccacacatggtgaatgaaaaaaaaaaaaaagaggctgtgttttgtcacacagggcagtcattcagcaccagagcacgtgatggtctgagactctcttaggagcagagctctgccgcaatggccatgtggggatccacacctggtctgaggggcaactgagtctgcgggagaagagcggccctatgcatggtgtagatgccctgataaagaacatctgtcctgtgaaagactcaatgagctgttatgttgtaaacaggaagcatttcacatccaaacgagaaaatcatgtaaacatgtgtcttttctgtagagcataataaatggatgaggtttttgcaaaaaaaaaaaaaaaaa

SEQ ID NO: 12 - protein, 391 aa, homo sapiens
MFSPWKISMFLSVREDSVPTTASFSADMLNVTLQGPTLNGTFAQSKCPQVEWLGWLNTIQPPFLWVLFVLATLENIFVLSVFCLHKSSCTVAEIYLGNLAAADLILACGLPFWAITISNNFDWLFGETLCRVVNAIISMNLYSSICFLMLVSIDRYLALVKTMSMGRMRGVRWAKLYSLVIWGCTLLLSSPMLVFRTMKEYSDEGHNVTACVISYPSLIWEVFTNMLLNVVGFLLPLSVITFCTMQIMQVLRNNEMQKFKEIQTERRATVLVLVVLLLFIICWLPFQISTFLDTLHRLGILSSCQDERIIDVITQIASFMAYSNSCLNPLVYVIVGKRFRKKSWEVYQGVCQKGGCRSEPIQMENSMGTLRTSISVERQIHKLQDWAGSRQ

SEQ ID NO: 13 - DNA, 1766 bp, homo sapiens
  CDS (211)..(1431)
aattcagagccaccgcgggcaggcgggcagtgcatccagaagcgtttatattctgagcgccagttcagctttcaaaaagagtgctgcccataaaaagccttccaccctcctgtctgctttagaaggaccctgagccccaggcgccagccacaggactctgctgcagaggggggttgtgtacagatagtaggctttacgcctagcttcgaaatggataacgtcctcccggtggactcagacctctccccaaacatctccactaacacctcggaacccaatcagttcgtgcaaccagcctggcaaattgtcctttgggcagctgcctacacggtcattgtggtgacctctgtggtgggcaacgtggtagtgatgtggatcatcttagcccacaaaagaatgaggacagtgacgaactattttctggtgaacctggccttcgcggaggcctccatggctgcattcaatacagtggtgaacttcacctatgctgtccacaacgaatggtactacggcctgttctactgcaagttccacaacttctttcccatcgccgctgtcttcgccagtatctactccatgacggctgtggcctttgataggtacatggccatcatacatcccctccagccccggctgtcagccacagccaccaaagtggtcatctgtgtcatctgggtcctggctctcctgctggccttcccccagggctactactcaaccacagagaccatgcccagcagagtcgtgtgcatgatcgaatggccagagcatccgaacaagatttatgagaaagtgtaccacatctgtgtgactgtgctgatctacttcctccccctgctggtgattggctatgcatacaccgtagtgggaatcacactatgggccagtgagatccccggggactcctctgaccgctaccacgagcaagtctctgccaagcgcaaggtggtcaaaatgatgattgtcgtggtgtgcaccttcgccatctgctggctgcccttccacatcttcttcctcctgccctacatcaacccagatctctacctgaagaagtttatccagcaggtctacctggccatcatgtggctggccatgagctccaccatgtacaaccccatcatctactgctgcctcaatgacaggttccgtctgggcttcaagcatgccttccggtgctgccccttcatcagcgccggcgactatgaggggctggaaatgaaatccacccggtatctccagacccagggcagtgtgtacaaagtcagccgcctggagaccaccatctccacagtggtgggggcccacgaggaggagccagaggacggccccaaggccacaccctcgtccctggacctgacctccaactgctcttcacgaagtgactccaagaccatgacagagagcttcagcttctcctccaatgtgctctcctaggccacagggcctttggcaggtgcagcccccactgcctttgacctgcctcccttcatgcatggaaattcccttcatctggaaccatcagaaacaccctcacactgggacttgcaaaaagggtcagtatgggttagggaaaacattccatccttgagtcaaaaaatctcaattcttccctatctttgccaccctcatgctgtgtgactcaaaccaaatcactgaactttgctgagcctgtaaaataaaaggtcggaccagcttttcctcaagagcccaatgcattccatttctggaagtgactttggctgcatgcgagtgctcatttcaggatg

SEQ ID NO: 14 - protein, 407 aa, homo sapiens
MDNVLPVDSDLSPNISTNTSEPNQFVQPAWQIVLWAAAYTVIVVTSVVGNVVVMWIILAHKRMRTVTNYFLVNLAFAEASMAAFNTVVNFTYAVHNEWYYGLFYCKFHNFFPIAAVFASIYSMTAVAFDRYMAIIHPLQPRLSATATKVVICVIWVLALLLAFPQGYYSTTETMPSRVVCMIEWPEHPNKIYEKVYHICVTVLIYFLPLLVIGYAYTVVGITLWASEIPGDSSDRYHEQVSAKRKVVKMMIVVVCTFAICWLPFHIFFLLPYINPDLYLKKFIQQVYLAIMWLAMSSTMYNPIIYCCLNDRFRLGFKHAFRCCPFISAGDYEGLEMKSTRYLQTQGSVYKVSRLETTISTVVGAHEEEPEDGPKATPSSLDLTSNCSSRSDSKTMTESFSFSSNVLS

SEQ ID NO: 15 - DNA, 1766 bp, homo sapiens
  CDS (211)..(1431)
aattcagagccaccgcgggcaggcgggcagtgcatccagaagcgtttatattctgagcgccagttcagctttcaaaaagagtgctgcccataaaaagccttccaccctcctgtctgctttagaaggaccctgagccccaggcgccagccacaggactctgctgcagaggggggttgtgtacagatagtaggctttacgcctagcttcgaaatggataacgtcctcccggtggactcagacctctccccaaacatctccactaacacctcggaacccaatcagttcgtgcaaccagcctggcaaattgtcctttgggcagctgcctacacggtcattgtggtgacctctgtggtgggcaacgtggtagtgatgtggatcatcttagcccacaaaagaatgaggacagtgacgaactattttctggtgaacctggccttcgcggaggcctccatggctgcattcaatacagtggtgaacttcacctatgctgtccacaacgaatggtactacggcctgttctactgcaagttccacaacttcttccccatcgccgctgtcttcgccagtatctactccatgacggctgtggcctttgataggtacatggccatcatacatcccctccagccccggctgtcagccacagccaccaaagtggtcatctgtgtcatctgggtcctggctctcctgctggccttcccccagggctactactcaaccacagagaccatgcccagcagagtcgtgtgcatgatcgaatggccagagcatccgaacaagatttatgagaaagtgtaccacatctgtgtgactgtgctgatctacttcctccccctgctggtgattggctatgcatacaccgtagtgggaatcacactatgggccagtgagatccccggggactcctctgaccgctaccacgagcaagtctctgccaagcgcaaggtggtcaaaatgatgattgtcgtggtgtgcaccttcgccatctgctggctgcccttccacatcttcttcctcctgccctacatcaacccagatctctacctgaagaagtttatccagcaggtctacctggccatcatgtggctggccatgagctccaccatgtacaaccccatcatctactgctgcctcaatgacaggttccgtctgggcttcaagcatgccttccggtgctgccccttcatcagcgccggcgactatgaggggctggaaatgaaatccacccggtatctccagacccagggcagtgtgtacaaagtcagccgcctggagaccaccatctccacagtggtgggggcccacgaggaggagccagaggacggccccaaggccacaccctcgtccctggacctgacctccaactgctcttcacgaagtgactccaagaccatgacagagagcttcagcttctcctccaatgtgctctcctaggccacagggcctttggcaggtgcagcccccactgcctttgacctgcctcccttcatgcatggaaattcccttcatctggaaccatcagaaacaccctcacactgggacttgcaaaaagggtcagtatgggttagggaaaacattccatccttgagtcaaaaaatctcaattcttccctatctttgccaccctcatgctgtgtgactcaaaccaaatcactgaactttgctgagcctgtaaaataaaaggtcggaccagcttttcctcaagagcccaatgcattccatttctggaagtgactttggctgcatgcgagtgctcatttcaggatg

SEQ ID NO: 16 - protein, 407 aa, homo sapiens; identical to SEQ ID NO: 14

SEQ ID NO: 17 - DNA, 1766 bp, homo sapiens
  CDS (211)..(1431)
aattcagagccaccgcgggcaggcgggcagtgcatccagaagcgtttatattctgagcgccagttcagctttcaaaaagagtgctgcccataaaaagccttccaccctcctgtctgctttagaaggaccctgagccccaggcgccagccacaggactctgctgcagaggggggttgtgtacagatagtaggctttacgcctagcttcgaaatggataacgtcctcccggtggactcagacctctccccaaacatctccactaacacctcggaacccaatcagttcgtgcaaccagcctggcaaattgtcctttgggcagctgcctacacggtcattgtggtgacctctgtggtgggcaacgtggtagtgatgtggatcatcttagcccacaaaagaatgaggacagtgacgaactattttctggtgaacctggccttcgcggaggcctccatggctgcattcaatacagtggtgaacttcacctatgctgtccacaacgaatggtactacggcctgttctactgcaagttccacaacttctttcccatcgccgctgtcttcgccagtatctactccatgacggctgtggcctttgataggtacatggccatcatacatcccctccagccccggctgtcagccacagccaccaaagtggtcatctgtgtcatatgggtcctggctctcctgctggccttcccccagggctactactcaaccacagagaccatgcccagcagagtcgtgtgcatgatcgaatggccagagcatccgaacaagatttatgagaaagtgtaccacatctgtgtgactgtgctgatctacttcctccccctgctggtgattggctatgcatacaccgtagtgggaatcacactatgggccagtgagatccccggggactcctctgaccgctaccacgagcaagtctctgccaagcgcaaggtggtcaaaatgatgattgtcgtggtgtgcaccttcgccatctgctggctgcccttccacatcttcttcctcctgccctacatcaacccagatctctacctgaagaagtttatccagcaggtctacctggccatcatgtggctggccatgagctccaccatgtacaaccccatcatctactgctgcctcaatgacaggttccgtctgggcttcaagcatgccttccggtgctgccccttcatcagcgccggcgactatgaggggctggaaatgaaatccacccggtatctccagacccagggcagtgtgtacaaagtcagccgcctggagaccaccatctccacagtggtgggggcccacgaggaggagccagaggacggccccaaggccacaccctcgtccctggacctgacctccaactgctcttcacgaagtgactccaagaccatgacagagagcttcagcttctcctccaatgtgctctcctaggccacagggcctttggcaggtgcagcccccactgcctttgacctgcctcccttcatgcatggaaattcccttcatctggaaccatcagaaacaccctcacactgggacttgcaaaaagggtcagtatgggttagggaaaacattccatccttgagtcaaaaaatctcaattcttccctatctttgccaccctcatgctgtgtgactcaaaccaaatcactgaactttgctgagcctgtaaaataaaaggtcggaccagcttttcctcaagagcccaatgcattccatttctggaagtgactttggctgcatgcgagtgctcatttcaggatg

SEQ ID NO: 18 - protein, 407 aa, homo sapiens; identical to SEQ ID NO: 14

SEQ ID NO: 19 - DNA, 1766 bp, homo sapiens
  CDS (211)..(1431)
aattcagagccaccgcgggcaggcgggcagtgcatccagaagcgtttatattctgagcgccagttcagctttcaaaaagagtgctgcccataaaaagccttccaccctcctgtctgctttagaaggaccctgagccccaggcgccagccacaggactctgctgcagaggggggttgtgtacagatagtaggctttacgcctagcttcgaaatggataacgtcctcccggtggactcagacctctccccaaacatctccactaacacctcggaacccaatcagttcgtgcaaccagcctggcaaattgtcctttgggcagctgcctacacggtcattgtggtgacctctgtggtgggcaacgtggtagtgatgtggatcatcttagcccacaaaagaatgaggacagtgacgaactattttctggtgaacctggccttcgcggaggcctccatggctgcattcaatacagtggtgaacttcacctatgctgtccacaacgaatggtactacggcctgttctactgcaagttccacaacttctttcccatcgccgctgtcttcgccagtatctactccatgacggctgtggcctttgataggtacatggccatcatacatcccctccagccccggctgtcagccacagccaccaaagtggtcatctgtgtcatctgggtcctggctctcctgctggccttcccccagggctactactcaaccacagagaccatgcccagcagagtcgtgtgcatgatcgaatggccagagcatccgaacaagatttatgagaaagtgtaccacatctgtgtgactgtgctgatctacttcctccccctgctggtgattggctatgcatacaccgtagtgggaatcacactatgggccagtgagatccccggggactcctctgaccgctaccacgagcaagtctctgccaagcgcaaggtggtcaaaatgatgattgtcgtggtgtgcaccttcgccatctgctggctgcccttccacatcttcttcctcctgccctacatcaacccagatctctacctgaagaagtttatccagcaggtctacctggccatcatgtggctggccatgagctccaccatgtacaaccccatcatctactgctgcctcaatgacaggttccgtctgggcttcaagcatgccttccggtgctgccccttcatcagcgccggcgactatgaggggctggaaatgaaatccacccggtatctccagacccagggcagtgtgtacaaagtcagccgcctggagaccaccatctccacagtggtgggggcccacgaggaggagccagaggacggccccaaggccacaccctcatccctggacctgacctccaactgctcttcacgaagtgactccaagaccatgacagagagcttcagcttctcctccaatgtgctctcctaggccacagggcctttggcaggtgcagcccccactgcctttgacctgcctcccttcatgcatggaaattcccttcatctggaaccatcagaaacaccctcacactgggacttgcaaaaagggtcagtatgggttagggaaaacattccatccttgagtcaaaaaatctcaattcttccctatctttgccaccctcatgctgtgtgactcaaaccaaatcactgaactttgctgagcctgtaaaataaaaggtcggaccagcttttcctcaagagcccaatgcattccatttctggaagtgactttggctgcatgcgagtgctcatttcaggatg

SEQ ID NO: 20 - protein, 407 aa, homo sapiens; identical to SEQ ID NO: 14

SEQ ID NO: 21 - DNA, 1826 bp, homo sapiens
  CDS (61)..(1560)
agtctgcactggagctgcctggtgaccagaagtttggagtccgctgacgtcgccgcccagatggcctccaggctgaccctgctgaccctcctgctgctgctgctggctggggatagagcctcctcaaatccaaatgctaccagctccagctcccaggatccagagagtttgcaagacagaggcgaagggaaggtcgcaacaacagttatctccaagatgctattcgttgaacccatcctggaggtttccagcttgccgacaaccaactcaacaaccaattcagccaccaaaataacagctaataccactgatgaacccaccacacaacccaccacagagcccaccacccaacccaccatccaacccacccaaccaactacccagctcccaacagattctcctacccagcccactactgggtccttctgcccaggacctgttactctctgctctgacttggagagtcattcaacagaggccgtgttgggggatgctttggtagatttctccctgaagctctaccacgccttctcagcaatgaagaaggtggagaccaacatggccttttccccattcagcatcgccagcctccttacccaggtcctgctcggggctgggcagaacaccaaaacaaacctggagagcatcctctcttaccccaaggacttcacctgtgtccaccaggccctgaagggcttcacgaccaaaggtgtcacctcagtctctcagatcttccacagcccagacctggccataagggacacctttgtgaatgcctctcggaccctgtacagcagcagccccagagtcctaagcaacaacagtgacgccaacttggagctcatcaacacctgggtggccaagaacaccaacaacaagatcagccggctgctagacagtctgccctccgatacccgccttgtcctcctcaatgctatctacctgagtgccaagtggaagacaacatttgatcccaagaaaaccagaatggaaccctttcacttcaaaaactcagttataaaagtgcccatgatgaatagcaagaagtaccctgtggcccatttcattgaccaaactttgaaagccaaggtggggcagctgcagctctcccacaatctgagtttggtgatcctggtaccccagaacctgaaacatcgtcttgaagacatggaacaggctctcagcccttctgttttcaaggccatcatggagaaactggagatgtccaagttccagcccactctcctaacactaccccgcatcaaagtgacgaccagccaggatatgctctcaatcatggagaaattggaattcttcgatttttcttatgaccttaacctgtgtgggctgacagaggacccagatcttcaggtttctgcgatgcagcaccagacagtgctggaactgacagagactggggtggaggcggctgcagcctccgccatctctgtggcccgcaccctgctggtctttgaagtgcagcagcccttcctcttcgtgctctgggaccagcagcacaagttccctgtcttcatggggcgagtatatgaccccagggcctgagacctgcaggatcaggttagggcgagcgctacctctccagcctcagctctcagttgcagccctgctgctgcctgcctggacttgcccctgccacctcctgcctcaggtgtccgctatccaccaaaagggctcctgagggtctgggcaagggacctgcttctattagcccttctccatggccctgccatgctctccaaaccactttttgcagctttctctagttcaagttcaccagactctataaataaaacctgacagaccat

SEQ ID NO: 22 - protein, 500 aa, homo sapiens
MASRLTLLTLLLLLLAGDRASSNPNATSSSSQDPESLQDRGEGKVATTVISKMLFVEPILEVSSLPTTNSTTNSATKITANTTDEPTTQPTTEPTTQPTIQPTQPTTQLPTDSPTQPTTGSFCPGPVTLCSDLESHSTEAVLGDALVDFSLKLYHAFSAMKKVETNMAFSPFSIASLLTQVLLGAGQNTKTNLESILSYPKDFTCVHQALKGFTTKGVTSVSQIFHSPDLAIRDTFVNASRTLYSSSPRVLSNNSDANLELINTWVAKNTNNKISRLLDSLPSDTRLVLLNAIYLSAKWKTTFDPKKTRMEPFHFKNSVIKVPMMNSKKYPVAHFIDQTLKAKVGQLQLSHNLSLVILVPQNLKHRLEDMEQALSPSVFKAIMEKLEMSKFQPTLLTLPRIKVTTSQDMLSIMEKLEFFDFSYDLNLCGLTEDPDLQVSAMQHQTVLELTETGVEAAAASAISVARTLLVFEVQQPFLFVLWDQQHKFPVFMGRVYDPRA

SEQ ID NO: 23 - DNA, 1826 bp, homo sapiens
  CDS (61)..(1560)
agtctgcactggagctgcctggtgaccagaagtttggagtccgctgacgtcgccgcccagatggcctccaggctgaccctgctgaccctcctgctgctgctgctggctggggatagagcctcctcaaatccaaatgctaccagctccagctcccaggatccagagagtttgcaagacagaggcgaagggaaggtcgcaacaacagttatctccaagatgctattcgttgaacccatcctggaggtttccagcttgccgacaaccaactcaacaaccaattcagccaccaaaataacagctaataccactgatgaacccaccacacaacccaccacagagcccaccacccaacccaccatccaacccacccaaccaactacccagctcccaacagattctcctacccagcccactactgggtccttctgcccaggacctgttactctctgctctgacttggagagtcattcaacagaggccgtgttgggggatgctttggtagatttctccctgaagctctaccacgccttctcagcaatgaagaaggtggagaccaacatggccttttccccattcagcatcgccagcctccttacccaggtcctgctcggggctgggcagaacaccaaaacaaacctggagagcatcctctcttaccccaaggacttcacctgtgtccaccaggccctgaagggcttcacgaccaaaggtgtcacctcagtctctcagatcttccacagcccagacctggccataagggacacctttgtgaatgcctctcggaccctgtacagcagcagccccagagtcctaagcaacaacagtgacgccaacttggagctcatcaacacctgggtggccaagaacaccaacaacaagatcagccggctgctagacagtctgccctccgatacccgccttgtcctcctcaatgctatctacctgagtgccaagtggaagacaacatttgatcccaagaaaaccagaatggaaccctttcacttcaaaaactcagttataaaagtgcccatgatgaatagcaagaagtaccctgtggcccatttcattgaccaaactttgaaagccaaggtggggcagctgcagctctcccacaatctgagtttggtgatcctggtaccccagaacctgaaacatcgtcttgaagacatggaacaggctctcagcccttctgttttcaaggccatcatggagaaactggagatgtccaagttccagcccactctcctaacactaccccgcatcaaagtgacgaccagtcaggatatgctctcaatcatggagaaattggaattcttcgatttttcttatgaccttaacctgtgtgggctgacagaggacccagatcttcaggtttctgcgatgcagcaccagacagtgctggaactgacagagactggggtggaggcggctgcagcctccgccatctctgtggcccgcaccctgctggtctttgaagtgcagcagcccttcctcttcgtgctctgggaccagcagcacaagttccctgtcttcatggggcgagtatatgaccccagggcctgagacctgcaggatcaggttagggcgagcgctacctctccagcctcagctctcagttgcagccctgctgctgcctgcctggacttgcccctgccacctcctgcctcaggtgtccgctatccaccaaaagggctcctgagggtctgggcaagggacctgcttctattagcccttctccatggccctgccatgctctccaaaccactttttgcagctttctctagttcaagttcaccagactctataaataaaacctgacagaccat

SEQ ID NO: 24 - protein, 500 aa, homo sapiens; identical to SEQ ID NO: 22

SEQ ID NO: 25 - DNA, 1826 bp, homo sapiens
  CDS (61)..(1560)
agtctgcactggagctgcctggtgaccagaagtttggagtccgctgacgtcgccgcccagatggcctccaggctgaccctgctgaccctcctgctgctgctgctggctggggatagagcctcctcaaatccaaatgctaccagctccagctcccaggatccagagagtttgcaagacagaggcgaagggaaggtcgcaacaacagttatctccaagatgctattcgctgaacccatcctggaggtttccagcttgccgacaaccaactcaacaaccaattcagccaccaaaataacagctaataccactgatgaacccaccacacaacccaccacagagcccaccacccaacccaccatccaacccacccaaccaactacccagctcccaacagattctcctacccagcccactactgggtccttctgcccaggacctgttactctctgctctgacttggagagtcattcaacagaggccgtgttgggggatgctttggtagatttctccctgaagctctaccacgccttctcagcaatgaagaaggtggagaccaacatggccttttccccattcagcatcgccagcctccttacccaggtcctgctcggggctgggcagaacaccaaaacaaacctggagagcatcctctcttaccccaaggacttcacctgtgtccaccaggccctgaagggcttcacgaccaaaggtgtcacctcagtctctcagatcttccacagcccagacctggccataagggacacctttgtgaatgcctctcggaccctgtacagcagcagccccagagtcctaagcaacaacagtgacgccaacttggagctcatcaacacctgggtggccaagaacaccaacaacaagatcagccggctgctagacagtctgccctccgatacccgccttgtcctcctcaatgctatctacctgagtgccaagtggaagacaacatttgatcccaagaaaaccagaatggaaccctttcacttcaaaaactcagttataaaagtgcccatgatgaatagcaagaagtaccctgtggcccatttcattgaccaaactttgaaagccaaggtggggcagctgcagctctcccacaatctgagtttggtgatcctggtaccccagaacctgaaacatcgtcttgaagacatggaacaggctctcagcccttctgttttcaaggccatcatggagaaactggagatgtccaagttccagcccactctcctaacactaccccgcatcaaagtgacgaccagccaggatatgctctcaatcatggagaaattggaattcttcgatttttcttatgaccttaacctgtgtgggctgacagaggacccagatcttcaggtttctgcgatgcagcaccagacagtgctggaactgacagagactggggtggaggcggctgcagcctccgccatctctgtggcccgcaccctgctggtctttgaagtgcagcagcccttcctcttcgtgctctgggaccagcagcacaagttccctgtcttcatggggcgagtatatgaccccagggcctgagacctgcaggatcaggttagggcgagcgctacctctccagcctcagctctcagttgcagccctgctgctgcctgcctggacttgcccctgccacctcctgcctcaggtgtccgctatccaccaaaagggctcctgagggtctgggcaagggacctgcttctattagcccttctccatggccctgccatgctctccaaaccactttttgcagctttctctagttcaagttcaccagactctataaataaaacctgacagaccat

SEQ ID NO: 26 - protein, 500 aa, homo sapiens
MASRLTLLTLLLLLLAGDRASSNPNATSSSSQDPESLQDRGEGKVATTVISKMLFAEPILEVSSLPTTNSTTNSATKITANTTDEPTTQPTTEPTTQPTIQPTQPTTQLPTDSPTQPTTGSFCPGPVTLCSDLESHSTEAVLGDALVDFSLKLYHAFSAMKKVETNMAFSPFSIASLLTQVLLGAGQNTKTNLESILSYPKDFTCVHQALKGFTTKGVTSVSQIFHSPDLAIRDTFVNASRTLYSSSPRVLSNNSDANLELINTWVAKNTNNKISRLLDSLPSDTRLVLLNAIYLSAKWKTTFDPKKTRMEPFHFKNSVIKVPMMNSKKYPVAHFIDQTLKAKVGQLQLSHNLSLVILVPQNLKHRLEDMEQALSPSVFKAIMEKLEMSKFQPTLLTLPRIKVTTSQDMLSIMEKLEFFDFSYDLNLCGLTEDPDLQVSAMQHQTVLELTETGVEAAAASAISVARTLLVFEVQQPFLFVLWDQQHKFPVFMGRVYDPRA

SEQ ID NO: 27 - DNA, 1826 bp, homo sapiens
  CDS (61)..(1560)
agtctgcactggagctgcctggtgaccagaagtttggagtccgctgacgtcgccgcccagatggcctccaggctgaccctgctgaccctcctgctgctgctgctggctggggatagagcctcctcaaatccaaatgctaccagctccagctcccaggatccagagagtttgcaagacagaggcgaagggaaggtcgcaacaacagttatctccaagatgctattcgttgaacccatcctggaggtttccagcttgccgacaaccaactcaacaaccaattcagccaccaaaataacagctaataccactgatgaacccaccacacaacccaccacagagcccaccacccaacccaccatccaacccacccaaccaactacccagctcccaacagattctcctacccagcccactactgggtccttctgcccaggacctgttactctctgctctgacttggagagtcattcaacagaggccgtgttgggggatgctttggtagatttctccctgaagctctaccacgccttctcaggaatgaagaaggtggagaccaacatggccttttccccattcagcatcgccagcctccttacccaggtcctgctcggggctgggcagaacaccaaaacaaacctggagagcatcctctcttaccccaaggacttcacctgtgtccaccaggccctgaagggcttcacgaccaaaggtgtcacctcagtctctcagatcttccacagcccagacctggccataagggacacctttgtgaatgcctctcggaccctgtacagcagcagccccagagtcctaagcaacaacagtgacgccaacttggagctcatcaacacctgggtggccaagaacaccaacaacaagatcagccggctgctagacagtctgccctccgatacccgccttgtcctcctcaatgctatctacctgagtgccaagtggaagacaacatttgatcccaagaaaaccagaatggaaccctttcacttcaaaaactcagttataaaagtgcccatgatgaatagcaagaagtaccctgtggcccatttcattgaccaaactttgaaagccaaggtggggcagctgcagctctcccacaatctgagtttggtgatcctggtaccccagaacctgaaacatcgtcttgaagacatggaacaggctctcagcccttctgttttcaaggccatcatggagaaactggagatgtccaagttccagcccactctcctaacactaccccgcatcaaagtgacgaccagccaggatatgctctcaatcatggagaaattggaattcttcgatttttcttatgaccttaacctgtgtgggctgacagaggacccagatcttcaggtttctgcgatgcagcaccagacagtgctggaactgacagagactggggtggaggcggctgcagcctccgccatctctgtggcccgcaccctgctggtctttgaagtgcagcagcccttcctcttcgtgctctgggaccagcagcacaagttccctgtcttcatggggcgagtatatgaccccagggcctgagacctgcaggatcaggttagggcgagcgctacctctccagcctcagctctcagttgcagccctgctgctgcctgcctggacttgcccctgccacctcctgcctcaggtgtccgctatccaccaaaagggctcctgagggtctgggcaagggacctgcttctattagcccttctccatggccctgccatgctctccaaaccactttttgcagctttctctagttcaagttcaccagactctataaataaaacctgacagaccat

SEQ ID NO: 28 - protein, 500 aa, homo sapiens
MASRLTLLTLLLLLLAGDRASSNPNATSSSSQDPESLQDRGEGKVATTVISKMLFVEPILEVSSLPTTNSTTNSATKITANTTDEPTTQPTTEPTTQPTIQPTQPTTQLPTDSPTQPTTGSFCPGPVTLCSDLESHSTEAVLGDALVDFSLKLYHAFSGMKKVETNMAFSPFSIASLLTQVLLGAGQNTKTNLESILSYPKDFTCVHQALKGFTTKGVTSVSQIFHSPDLAIRDTFVNASRTLYSSSPRVLSNNSDANLELINTWVAKNTNNKISRLLDSLPSDTRLVLLNAIYLSAKWKTTFDPKKTRMEPFHFKNSVIKVPMMNSKKYPVAHFIDQTLKAKVGQLQLSHNLSLVILVPQNLKHRLEDMEQALSPSVFKAIMEKLEMSKFQPTLLTLPRIKVTTSQDMLSIMEKLEFFDFSYDLNLCGLTEDPDLQVSAMQHQTVLELTETGVEAAAASAISVARTLLVFEVQQPFLFVLWDQQHKFPVFMGRVYDPRA

SEQ ID NO: 29 - DNA, 1826 bp, homo sapiens
  CDS (61)..(1560)
agtctgcactggagctgcctggtgaccagaagtttggagtccgctgacgtcgccgcccagatggcctccaggctgaccctgctgaccctcctgctgctgctgctggctggggatagagcctcctcaaatccaaatgctaccagctccagctcccaggatccagagagtttgcaagacagaggcgaagggaaggtcgcaacaacagttatctccaagatgctattcgttgaacccatcctggaggtttccagcttgccgacaaccaactcaacaaccaattcagccaccaaaataacagctaataccactgatgaacccaccacacaacccaccacagagcccaccacccaacccaccatccaacccacccaaccaactacccagctcccaacagattctcctacccagcccactactgggtccttctgcccaggacctgttactctctgctctgacttggagagtcattcaacagaggccgtgttgggggatgctttggtagatttctccctgaagctctaccacgccttctcagcaatgaagaaggtggagaccaacatggccttttccccattcagcatcgccagcctccttacccaggtcctgctcggggctgggcagaacaccaaaacaaacctggagagcatcctctcttaccccaaggacttcacctgtgtccaccaggccctgaagggcttcacgaccaaaggtgtcacctcagtctctcagatcttccacagcccagacctggccataagggacacctttgtgaatgcctctcggaccctgtacagcagcagccccagagtcctaagcaacaacagtgacgccaacttggagctcatcaacacctgggtggccaagaacaccaacaacaagatcagccggctgctagacagtctgccctccgatacccgccttgtcctcctcaatgctatctacctgagtgccaagtggaagacaacatttgatcccaagaaaaccagaatggaaccctttcacttcaaaaactcagttataaaagtgcccatgatgaatagcaagaagtaccctgtggcccatttcattgaccaaactttgaaagccaaggtggggcagctgcagctctcccacaatctgagtttggtgatcctggtaccccagaacctgaaacatcgtcttgaagacatggaacaggctctcagcccttctgttttcaaggccatcatggagaaactggagatgtccaagttccagcccactctcctaacactaccccgcatcaaagtgacgaccagccaggatatgctctcaatcatggagaaattggaattcttcgatttttcttatgaccttaacctgtgtgggctgacagaggacccagatcttcaggtttctgcgatgcagcaccagacagtgctggaactgacagagactggggtggaggcggctgcagcctccgccatctctgtggcccgcaccctgctggtctttgaagtgcagcagcccttcctcttcatgctctgggaccagcagcacaagttccctgtcttcatggggcgagtatatgaccccagggcctgagacctgcaggatcaggttagggcgagcgctacctctccagcctcagctctcagttgcagccctgctgctgcctgcctggacttgcccctgccacctcctgcctcaggtgtccgctatccaccaaaagggctcctgagggtctgggcaagggacctgcttctattagcccttctccatggccctgccatgctctccaaaccactttttgcagctttctctagttcaagttcaccagactctataaataaaacctgacagaccat

SEQ ID NO: 30 - protein, 500 aa, homo sapiens
MASRLTLLTLLLLLLAGDRASSNPNATSSSSQDPESLQDRGEGKVATTVISKMLFVEPILEVSSLPTTNSTTNSATKITANTTDEPTTQPTTEPTTQPTIQPTQPTTQLPTDSPTQPTTGSFCPGPVTLCSDLESHSTEAVLGDALVDFSLKLYHAFSAMKKVETNMAFSPFSIASLLTQVLLGAGQNTKTNLESILSYPKDFTCVHQALKGFTTKGVTSVSQIFHSPDLAIRDTFVNASRTLYSSSPRVLSNNSDANLELINTWVAKNTNNKISRLLDSLPSDTRLVLLNAIYLSAKWKTTFDPKKTRMEPFHFKNSVIKVPMMNSKKYPVAHFIDQTLKAKVGQLQLSHNLSLVILVPQNLKHRLEDMEQALSPSVFKAIMEKLEMSKFQPTLLTLPRIKVTTSQDMLSIMEKLEFFDFSYDLNLCGLTEDPDLQVSAMQHQTVLELTETGVEAAAASAISVARTLLVFEVQQPFLFMLWDQQHKFPVFMGRVYDPRA

SEQ ID NO: 31 - DNA, 871 bp, homo sapiens
  CDS (37)..(822)
tcctccacctgctggcccctggacacctctgtcaccatgtggttcctggttctgtgcctcgccctgtccctgggggggactggtgctgcgcccccgattcagtcccggattgtgggaggctgggagtgtgagcagcattcccagccctggcaggcggctctgtaccatttcagcactttccagtgtgggggcatcctggtgcaccgccagtgggtgctcacagctgctcattgcatcagcgacaattaccagctctggctgggtcgccacaacttgtttgacgacgaaaacacagcccagtttgttcatgtcagtgagagcttcccacaccctggcttcaacatgagcctcctggagaaccacacccgccaagcagacgaggactacagccacgacctcatgctgctccgcctgacagagcctgctgataccatcacagatgctgtgaaggtcgtggagttgcccaccgaggaacccgaagtggggagcacctgtttggcttccggctggggcagcatcgaaccagagaatttctcatttccagatgatctccagtgtgtggacctcaaaatcctgcctaatgatgagtgcaaaaaagcccacgtccagaaggtgacagacttcatgctgtgtgtcggacacctggaaggtggcaaagacacctgtgtgggtgattcagggggcccgctgatgtgtgatggtgtgctccaaggtgtcacatcatggggctacgtcccttgtggcacccccaataagccttctgtcgccgtcagagtgctgtcttatgtgaagtggatcgaggacaccatagcggagaactcctgaacgcccagccctgtcccctacccccagtaaaatcaaatgtgcatcc

SEQ ID NO: 32 - protein, 262 aa, homo sapiens
MWFLVLCLALSLGGTGAAPPIQSRIVGGWECEQHSQPWQAALYHFSTFQCGGILVHRQWVLTAAHCISDNYQLWLGRHNLFDDENTAQFVHVSESFPHPGFNMSLLENHTRQADEDYSHDLMLLRLTEPADTITDAVKVVELPTEEPEVGSTCLASGWGSIEPENFSFPDDLQCVDLKILPNDECKKAHVQKVTDFMLCVGHLEGGKDTCVGDSGGPLMCDGVLQGVTSWGYVPCGTPNKPSVAVRVLSYVKWIEDTIAENS

SEQ ID NO: 33 - DNA, 871 bp, homo sapiens
  CDS (37)..(822)
tcctccacctgctggcccctggacacctctgtcaccatgtggttcctggttctgtgcctcgccctgtccctgggggggactggtgctgcgcccccgattcagtcccggattgtgggaggctgggagtgtgagcagcattcccagccctggcaggcggctctgtaccatttcagcactttccagtgtgggggcatcctggtgcaccgccagtgggtgctcacagctgctcattgcatcagcgacaattaccagctctggctgggtcgccacaacttgtttgacgacgaaaacacagcccagtttgttcatgtcagtgagagcttcccacaccctggcttcaacatgagcctcctggagaaccacacccgccaagcagacgaggactacagccacgacctcatgctgctccgcctgacagagcctgctgataccatcacagatgctgtgaaggtcgtggagttgcccaccgaggaacccgaagtggggagcacctgtttggcttccggctggggcagcatcgaaccagagaatttctcatttccagatgatctccagtgtgtggacctcaaaatcctgcctaatgatgagtgcgaaaaagcccacgtccagaaggtgacagacttcatgctgtgtgtcggacacctggaaggtggcaaagacacctgtgtgggtgattcagggggcccgctgatgtgtgatggtgtgctccaaggtgtcacatcatggggctacgtcccttgtggcacccccaataagccttctgtcgccgtcagagtgctgtcttatgtgaagtggatcgaggacaccatagcggagaactcctgaacgcccagccctgtcccctacccccagtaaaatcaaatgtgcatcc

SEQ ID NO: 34 - protein, 262 aa, homo sapiens
MWFLVLCLALSLGGTGAAPPIQSRIVGGWECEQHSQPWQAALYHFSTFQCGGILVHRQWVLTAAHCISDNYQLWLGRHNLFDDENTAQFVHVSESFPHPGFNMSLLENHTRQADEDYSHDLMLLRLTEPADTITDAVKVVELPTEEPEVGSTCLASGWGSIEPENFSFPDDLQCVDLKILPNDECEKAHVQKVTDFMLCVGHLEGGKDTCVGDSGGPLMCDGVLQGVTSWGYVPCGTPNKPSVAVRVLSYVKWIEDTIAENS

SEQ ID NO: 35 - DNA, 871 bp, homo sapiens
  CDS (37)..(822)
tcctccacctgctggcccctggacacctctgtcaccatgtggttcctggttctgtgcctcgccctgtccctgggggggactggtgctgcgcccccgattcagtcccggattgtgggaggctgggagtgtgagcagcattcccagccctggcaggcggctctgtaccatttcagcactttccagtgtgggggcatcctggtgcaccgccagtgggtgctcacagctgctcattgcatcagcgacaattaccagctctggctgggtcgccacaacttgtttgacgacgaaaacacagcccagtttgttcatgtcagtgagagcttcccacaccctggcttcaacatgagcctcctggagaaccacacccgccaagcagacgaggactacagccacgacctcatgctgctccgcctgacagagcctgctgataccatcacagatgctgtgaaggtcgtggagttgcccacccaggaacccgaagtggggagcacctgtttggcttccggctggggcagcatcgaaccagagaatttctcatttccagatgatctccagtgtgtggacctcaaaatcctgcctaatgatgagtgcaaaaaagcccacgtccagaaggtgacagacttcatgctgtgtgtcggacacctggaaggtggcaaagacacctgtgtgggtgattcagggggcccgctgatgtgtgatggtgtgctccaaggtgtcacatcatggggctacgtcccttgtggcacccccaataagccttctgtcgccgtcagagtgctgtcttatgtgaagtggatcgaggacaccatagcggagaactcctgaacgcccagccctgtcccctacccccagtaaaatcaaatgtgcatcc

SEQ ID NO: 36 - protein, 262 aa, homo sapiens [sequence omitted]

SEQ ID NO: 37 - DNA, 19 bp, homo sapiens
gctgtctcccgagcatgtg

SEQ ID NO: 38 - DNA, 19 bp, homo sapiens
agaacagtctagtgttaca

SEQ ID NO: 39 - DNA, 19 bp, homo sapiens
ctcaccaccctcccccaag

SEQ ID NO: 40 - DNA, 19 bp, homo sapiens
aggcctcagtccaagctga

SEQ ID NO: 41 - DNA, 19 bp, homo sapiens
cgggccccagccctcactc

SEQ ID NO: 42 - DNA, 19 bp, homo sapiens
taataaaagaggggtggcc

SEQ ID NO: 43 - DNA, 19 bp, homo sapiens
aaaagcagcgaaacccttt

SEQ ID NO: 44 - DNA, 18 bp, homo sapiens
cacaggggcgttttcaga

SEQ ID NO: 45 - DNA, 19 bp, homo sapiens
tttgccaccatttcgtggc

SEQ ID NO: 46 - DNA, 19 bp, homo sapiens
agcatgcacctgagtcacc

SEQ ID NO: 47 - DNA, 13 bp, homo sapiens
aggttctccacca

SEQ ID NO: 48 - DNA, 14 bp, homo sapiens
cctccaccaaggcc

SEQ ID NO: 49 - DNA, 18 bp, homo sapiens
gacccagtgcagggttag

SEQ ID NO: 50 - DNA, 19 bp, homo sapiens
tttccccgggctcttcctt

SEQ ID NO: 51 - DNA, 19 bp, homo sapiens
gcctttcctaggctcgagc

SEQ ID NO: 52 - DNA, 19 bp, homo sapiens
aatatttaacgctgatctg

SEQ ID NO: 53 - DNA, 14 bp, homo sapiens
gaaaggaagacata

SEQ ID NO: 54 - DNA, 19 bp, homo sapiens
aggattggctctggctttt

SEQ ID NO: 55 - DNA, 16 bp, homo sapiens
tggaggacgggaggag

SEQ ID NO: 56 - DNA, 16 bp, homo sapiens
tggcttagagaggctg

SEQ ID NO: 57 - DNA, 19 bp, homo sapiens
ggtcccaggacccaggaac

SEQ ID NO: 58 - DNA, 18 bp, homo sapiens
taccacaccctgggcccc

SEQ ID NO: 59 - DNA, 19 bp, homo sapiens
gcattccagctctttcacc

SEQ ID NO: 60 - DNA, 17 bp, homo sapiens
tgtgggccggctcttca

SEQ ID NO: 61 - DNA, 18 bp, homo sapiens
ataaatgttggcagcact

SEQ ID NO: 62 - DNA, 19 bp, homo sapiens
acaaagaattgataagaaa

SEQ ID NO: 63 - DNA, 19 bp, homo sapiens
acggactgagaccctgtct

SEQ ID NO: 64 - DNA, 19 bp, homo sapiens
cagtggccatgcctataat

SEQ ID NO: 65 - DNA, 19 bp, homo sapiens
ggctccccccgccgcgccc

SEQ ID NO: 66 - DNA, 19 bp, homo sapiens
gcgccccccaccgcgccca

SEQ ID NO: 67 - DNA, 18 bp, homo sapiens
aggtcatgttccccctct

SEQ ID NO: 68 - DNA, 19 bp, homo sapiens
gggatgaggcctggggtgc

SEQ ID NO: 69 - DNA, 19 bp, homo sapiens
gtgctgcctgtggggacag

SEQ ID NO: 70 - DNA, 15 bp, homo sapiens
aggacacagcacagt

SEQ ID NO: 71 - DNA, 19 bp, homo sapiens
gtcccacaacccccctgct

SEQ ID NO: 72 - DNA, 19 bp, homo sapiens
gcacaaccatctgtccctg

SEQ ID NO: 73 - DNA, 18 bp, homo sapiens
tgaggcatcattacgcag

SEQ ID NO: 74 - DNA, 19 bp, homo sapiens
aggtgctcactggctccct

SEQ ID NO: 75 - DNA, 18 bp, homo sapiens
tgagtctttcacaggaca

SEQ ID NO: 76 - DNA, 18 bp, homo sapiens
ctttcacaggacagatgt

SEQ ID NO: 77 - DNA, 19 bp, homo sapiens
agaccatcatgtgctctgg

SEQ ID NO: 78 - DNA, 15 bp, homo sapiens
accattgtcattcct

SEQ ID NO: 79 - DNA, 18 bp, homo sapiens
taaacaaaatttgcctag

SEQ ID NO: 80 - DNA, 19 bp, homo sapiens
ccatgccagaaacctgggg

SEQ ID NO: 81 - DNA, 19 bp, homo sapiens
caacttctttcccatcgcc

SEQ ID NO: 82 - DNA, 19 bp, homo sapiens
caggacccatatgacacag

SEQ ID NO: 83 - DNA, 18 bp, homo sapiens
ttctgcctgtcccctgct

SEQ ID NO: 84 - DNA, 19 bp, homo sapiens
gaatgggcttttgggaaaa

SEQ ID NO: 85 - DNA, 19 bp, homo sapiens
tttgagtcacacagcatga

SEQ ID NO: 86 - DNA, 19 bp, homo sapiens
tgcaagtcctagtgtgagg

SEQ ID NO: 87 - DNA, 19 bp, homo sapiens
gtccagggacgagggtgtg

SEQ ID NO: 88 - DNA, 16 bp, homo sapiens
aaaggacagagggaat

SEQ ID NO: 89 - DNA, 19 bp, homo sapiens
actgttaaggtgcatctct

SEQ ID NO: 90 - DNA, 17 bp, homo sapiens
cgaccagccaggatatg

SEQ ID NO: 91 - DNA, 19 bp, homo sapiens
tgctattcgttgaacccat

SEQ ID NO: 92 - DNA, 19 bp, homo sapiens
ccttctcagcaatgaagaa

SEQ ID NO: 93 - DNA, 19 bp, homo sapiens
ttcctcttcatgctctggg

SEQ ID NO: 94 - DNA, 19 bp, homo sapiens
gggctttttcgcactcatc

SEQ ID NO: 95 - DNA, 19 bp, homo sapiens
ccccatccccgccttgggc

SEQ ID NO: 96 - DNA, 19 bp, homo sapiens
ttgcccaccgaggaacccg

SEQ ID NO: 97 - DNA, 19 bp, homo sapiens
ggactcctgcgtccaaggg

SEQ ID NO: 98 - DNA, 19 bp, homo sapiens
ggcatgagactgacacagc

SEQ ID NO: 99 - DNA, 19 bp, homo sapiens
tggaaagatgggtgatggc

SEQ ID NO: 100 - DNA, 19 bp, homo sapiens
gctgtctccggagcatgtg

SEQ ID NO: 101 - DNA, 19 bp, homo sapiens
agaacagtccagtgttaca

SEQ ID NO: 102 - DNA, 19 bp, homo sapiens
ctcaccaccttcccccaag

SEQ ID NO: 103 - DNA, 19 bp, homo sapiens
aggcctcagcccaagctga

SEQ ID NO: 104 - DNA, 19 bp, homo sapiens
cgggccccaaccctcactc

SEQ ID NO: 105 - DNA, 19 bp, homo sapiens
taataaaaggggggtggcc

SEQ ID NO: 106 - DNA, 19 bp, homo sapiens
aaaagcagcaaaacccttt

SEQ ID NO: 107 - DNA, 18 bp, homo sapiens
cacaggggtgttttcaga

SEQ ID NO: 108 - DNA, 19 bp, homo sapiens
tttgccaccgtttcgtggc

SEQ ID NO: 109 - DNA, 19 bp, homo sapiens
agcatgcacgtgagtcacc

SEQ ID NO: 110 - DNA, 13 bp, homo sapiens
aggtcctccacca

SEQ ID NO: 111 - DNA, 14 bp, homo sapiens
cctccatcaaggcc

SEQ ID NO: 112 - DNA, 18 bp, homo sapiens
gacccagtacagggttag

SEQ ID NO: 113 - DNA, 19 bp, homo sapiens
tttccccggcctcttcctt

SEQ ID NO: 114 - DNA, 19 bp, homo sapiens
gcctttcctgggctcgagc

SEQ ID NO: 115 - DNA, 19 bp, homo sapiens
aatatttaatgctgatctg

SEQ ID NO: 116 - DNA, 14 bp, homo sapiens
gaaaggacgacata

SEQ ID NO: 117 - DNA, 19 bp, homo sapiens
aggattggcgctggctttt

SEQ ID NO: 118 - DNA, 16 bp, homo sapiens
tggaggatgggaggag

SEQ ID NO: 119 - DNA, 16 bp, homo sapiens
tggcttggagaggctg

SEQ ID NO: 120 - DNA, 19 bp, homo sapiens
ggtcccaggccccaggaac

SEQ ID NO: 121 - DNA, 18 bp, homo sapiens
taccacaccgtgggcccc

SEQ ID NO: 122 - DNA, 19 bp, homo sapiens
gcattccagttctttcacc

SEQ ID NO: 123 - DNA, 17 bp, homo sapiens
tgtgggccagctcttca

SEQ ID NO: 124 - DNA, 18 bp, homo sapiens
ataaatgtcggcagcact

SEQ ID NO: 125 - DNA, 19 bp, homo sapiens
acaaagaatcgataagaaa

SEQ ID NO: 126 - DNA, 19 bp, homo sapiens
acggactgaaaccctgtct

SEQ ID NO: 127 - DNA, 19 bp, homo sapiens
cagtggccacgcctataat

SEQ ID NO: 128 - DNA, 19 bp, homo sapiens
ggctcccccggccgcgccc

SEQ ID NO: 129 - DNA, 19 bp, homo sapiens
gcgccccccgccgcgccca

SEQ ID NO: 130 - DNA, 18 bp, homo sapiens
aggtcatgatccccctct

SEQ ID NO: 131 - DNA, 19 bp, homo sapiens
gggatgaggtctggggtgc

SEQ ID NO: 132 - DNA, 19 bp, homo sapiens
gtgctgcctatggggacag

SEQ ID NO: 133 - DNA, 15 bp, homo sapiens
aggacgcagcacagt

SEQ ID NO: 134 - DNA, 19 bp, homo sapiens
gtcccacaagccccctgct

SEQ ID NO: 135 - DNA, 19 bp, homo sapiens
gcacaaccacctgtccctg

SEQ ID NO: 136 - DNA, 18 bp, homo sapiens
tgaggcatctttacgcag

SEQ ID NO: 137 - DNA, 19 bp, homo sapiens
aggtgctcattggctccct

SEQ ID NO: 138 - DNA, 18 bp, homo sapiens
tgagtcttgcacaggaca

SEQ ID NO: 139 - DNA, 18 bp, homo sapiens
ctttcacagtacagatgt

SEQ ID NO: 140 - DNA, 19 bp, homo sapiens
agaccatcacgtgctctgg

SEQ ID NO: 141 - DNA, 15 bp, homo sapiens
accattgccattcct

SEQ ID NO: 142 - DNA, 18 bp, homo sapiens
taaacaaaacttgcctag

SEQ ID NO: 143 - DNA, 19 bp, homo sapiens
ccatgccaggaacctgggg

SEQ ID NO: 144 - DNA, 19 bp, homo sapiens
caacttcttccccatcgcc

SEQ ID NO: 145 - DNA, 19 bp, homo sapiens
caggacccagatgacacag

SEQ ID NO: 146 - DNA, 18 bp, homo sapiens
ttctgcctggcccctgct

SEQ ID NO: 147 - DNA, 19 bp, homo sapiens
gaatgggctcttgggaaaa

SEQ ID NO: 148 - DNA, 19 bp, homo sapiens
tttgagtcaaacagcatga

SEQ ID NO: 149 - DNA, 19 bp, homo sapiens
tgcaagtcccagtgtgagg

SEQ ID NO: 150 - DNA, 19 bp, homo sapiens
gtccagggatgagggtgtg

SEQ ID NO: 151 - DNA, 16 bp, homo sapiens
aaaggacaaagggaat

SEQ ID NO: 152 - DNA, 19 bp, homo sapiens
actgttaagatgcatctct

SEQ ID NO: 153 - DNA, 17 bp, homo sapiens
cgaccagtcaggatatg

SEQ ID NO: 154 - DNA, 19 bp, homo sapiens
tgctattcgctgaacccat

SEQ ID NO: 155 - DNA, 19 bp, homo sapiens
ccttctcaggaatgaagaa

SEQ ID NO: 156 - DNA, 19 bp, homo sapiens
ttcctcttcgtgctctggg

SEQ ID NO: 157 - DNA, 19 bp, homo sapiens
gggcttttttgcactcatc

SEQ ID NO: 158 - DNA, 19 bp, homo sapiens
ccccatccctgccttgggc

SEQ ID NO: 159 - DNA, 19 bp, homo sapiens
ttgcccacccaggaacccg

SEQ ID NO: 160 - DNA, 19 bp, homo sapiens
ggactcctgtgtccaaggg

SEQ ID NO: 161 - DNA, 19 bp, homo sapiens
ggcatgagattgacacagc

SEQ ID NO: 162 - DNA, 19 bp, homo sapiens
tggaaagataggtgatggc

SEQ ID NO: 163 - DNA, 41 bp, homo sapiens
gatgtcagcctgctgtctcccgagcatgtgagtgcccctca

SEQ ID NO: 164 - DNA, 41 bp, homo sapiens
gtctcctttgcagaacagtccagtgttacactgagtccagt

SEQ ID NO: 165 - DNA, 41 bp, homo sapiens
ccagatttcccctcaccaccttcccccaagggggcacccaa

SEQ ID NO: 166 - DNA, 41 bp, homo sapiens
ggccactgacaaggcctcagcccaagctgagcctcatccta

SEQ ID NO: 167 - DNA, 41 bp, homo sapiens
agaaagggttggagtgagggttggggcccgagtctcttttt

SEQ ID NO: 168 - DNA, 41 bp, homo sapiens
agcactccccaggccaccccccttttattataccctctatg

SEQ ID NO: 169 - DNA, 41 bp, homo sapiens
tttgtttgaggaaagggtttcgctgctttttaagaggatgc

SEQ ID NO: 170 - DNA, 41 bp, homo sapiens
cctgccagtcctctgaaaacacccctgtgccatggagacct

SEQ ID NO: 171 - DNA, 41 bp, homo sapiens
tagagagcattgccacgaaatggtggcaaatctcacgtctg

SEQ ID NO: 172 - DNA, 41 bp, homo sapiens
ttgcaaaccttagcatgcacctgagtcacctgggatgcttg

SEQ ID NO: 173 - DNA, 41 bp, homo sapiens
gaagcccaggccccagaggtcctcccaccaaggcctcccac

SEQ ID NO: 174 - DNA, 41 bp, homo sapiens
aggccccagaggtcctcccaccaaggcctcccacgtgaccc

SEQ ID NO: 175 - DNA, 41 bp, homo sapiens
ggcctcccacgtgacccagtgcagggttaggctgcccttct

SEQ ID NO: 176 - DNA, 41 bp, homo sapiens
ggaaaggcctgaaggaagaggccggggaaagagccctccct

SEQ ID NO: 177 - DNA, 41 bp, homo sapiens
accctctgtctgctcgagcccaggaaaggcctgaaggaaga

SEQ ID NO: 178 - DNA, 41 bp, homo sapiens
cttgcctcaggcagatcagcattaaatattccttgtcaatt

SEQ ID NO: 179 - DNA, 41 bp, homo sapiens
actgataccatgtttatgtcttcctttctagggccagtggg

SEQ ID NO: 180 - DNA, 41 bp, homo sapiens
aaataaataataaaagccagagccaatctggtgtgtgccag

SEQ ID NO: 181 - DNA, 41 bp, homo sapiens
ctcctctggctcctcctcccgtcctccatatcacctcttcc

SEQ ID NO: 182 - DNA, 41 bp, homo sapiens
acctcttggcagcttggcttagagaggctgtcaccccttct

SEQ ID NO: 183 - DNA, 41 bp, homo sapiens
cctatggagaaggtcccaggccccaggaacacagggcttct

SEQ ID NO: 184 - DNA, 41 bp, homo sapiens
ccggggttgtataccacaccctgggcccctaatcccaggcc

SEQ ID NO: 185 - DNA, 41 bp, homo sapiens
cagatgagccagcattccagctctttcacccttcagcaaca

SEQ ID NO: 186 - DNA, 41 bp, homo sapiens
aatttatgtctttgtgggccggctcttcaggaccaaggtct

SEQ ID NO: 187 - DNA, 41 bp, homo sapiens
ctgctgcacagagtgctgccgacatttatcatctccatctg

SEQ ID NO: 188 - DNA, 41 bp, homo sapiens
agaagcttggctttcttatcaattctttgtgacataataaa

SEQ ID NO: 189 - DNA, 41 bp, homo sapiens
tgttgttgttgagacagggtctcagtccgtcggcccagact

SEQ ID NO: 190 - DNA, 41 bp, homo sapiens
atagtgctaggattataggcgtggccactgcgcctggcccc

SEQ ID NO: 191 - DNA, 41 bp, homo sapiens
caaatctgcagggctccccccaccgcgcccaggtgggcccc

SEQ ID NO: 192 - DNA, 41 bp, homo sapiens
aaatctgcagggctccccccaccgcgcccaggtgggcccct

SEQ ID NO: 193 - DNA, 41 bp, homo sapiens
aagggctggctgaggtcatgttccccctctgagactcagtt

SEQ ID NO: 194 - DNA, 41 bp, homo sapiens
cagggagagctgggatgaggcctggggtgctgcctgtgggg

SEQ ID NO: 195 - DNA, 41 bp, homo sapiens
tgaggcctggggtgctgcctgtggggacagcacgcatgctt

SEQ ID NO: 196 - DNA, 41 bp, homo sapiens
tgctgccagggcccgaagacgcagcacagttttttctccag

SEQ ID NO: 197 - DNA, 41 bp, homo sapiens
gccctggagggagcaggggggttgtgggacacagacttgga

SEQ ID NO: 198 - DNA, 41 bp, homo sapiens
gggaactgaggcagggacagatggttgtgcaatagttattg

SEQ ID NO: 199 - DNA, 41 bp, homo sapiens
tcccagttacgtctgcgtaatgatgcctcacatgtacgtag

SEQ ID NO: 200 - DNA, 41 bp, homo sapiens
tgacaggtggaagggagccaatgagcacctactgtgtgcca

SEQ ID NO: 201 - DNA, 41 bp, homo sapiens
ataacagctcattgagtctttcacaggacagatgttcttta

SEQ ID NO: 202 - DNA, 41 bp, homo sapiens
gctcattgagtctttcacaggacagatgttctttatcaggg

SEQ ID NO: 203 - DNA, 41 bp, homo sapiens
aagagagtctcagaccatcacgtgctctggtgctgaatgac

SEQ ID NO: 204 - DNA, 41 bp, homo sapiens
gccgatggtgaacaccattgccattccttttcacactcttc

SEQ ID NO: 205 - DNA, 41 bp, homo sapiens
tatggagacagactaggcaagttttgtttaataaatgagtg

SEQ ID NO: 206 - DNA, 41 bp, homo sapiens
tgagcgatgagccccaggttcctggcatggatggatggatg

SEQ ID NO: 207 - DNA, 41 bp, homo sapiens
gcgaagacagcggcgatgggaaagaagttgtggaacttgca

SEQ ID NO: 208 - DNA, 41 bp, homo sapiens
agcaggagagccaggacccagatgacacagatgaccacttt

SEQ ID NO: 209 - DNA, 41 bp, homo sapiens
gggtgggttagttctgcctgtcccctgctcaccttgcgctt

SEQ ID NO: 210 - DNA, 41 bp, homo sapiens
cagaatggaatgaatgggcttttgggaaaagctggtccgac

SEQ ID NO: 211 - DNA, 41 bp, homo sapiens
cagtgatttggtttgagtcacacagcatgagggtggcaaag

SEQ ID NO: 212 - DNA, 41 bp, homo sapiens
ctgaccctttttgcaagtcccagtgtgagggtgtttctgat

SEQ ID NO: 213 - DNA, 41 bp, homo sapiens
ttggaggtcaggtccagggacgagggtgtggccttggggcc

SEQ ID NO: 214 - DNA, 41 bp, homo sapiens
cgctggggaaagaaaggacagagggaatgttggagctacag

SEQ ID NO: 215 - DNA, 41 bp, homo sapiens
gcggtaggaagactgttaagatgcatctcttattttctagg

SEQ ID NO: 216 - DNA, 41 bp, homo sapiens
cgcatcaaagtgacgaccagccaggatatgctctcaatcat

SEQ ID NO: 217 - DNA, 41 bp, homo sapiens
tatctccaagatgctattcgttgaacccatcctggaggttt

SEQ ID NO: 218 - DNA, 41 bp, homo sapiens
gctctaccacgccttctcagcaatgaagaaggtggagacca

SEQ ID NO: 219 - DNA, 41 bp, homo sapiens
tgcagcagcccttcctcttcgtgctctgggaccagcagcac

SEQ ID NO: 220 - DNA, 41 bp, homo sapiens
tcctgcctaatgatgagtgcaaaaaagcccacgtccagaag

SEQ ID NO: 221 - DNA, 41 bp, homo sapiens
cagactgtgtagcccaaggcggggatggggactcctgcgtc

SEQ ID NO: 222 - DNA, 41 bp, homo sapiens
aggtcgtggagttgcccaccgaggaacccgaagtggggagc

SEQ ID NO: 223 - DNA, 41 bp, homo sapiens
ggcggggatggggactcctgcgtccaagggagaaagggcca

SEQ ID NO: 224 - DNA, 41 bp, homo sapiens
gggccaccccagctgtgtcaatctcatgcctggaagtctga

SEQ ID NO: 225 - DNA, 41 bp, homo sapiens
tgtcacgttctgccatcacctatctttccagatgtggtgca

SEQ ID NO: 226 - DNA, 41 bp, homo sapiens
gatgtcagcctgctgtctccggagcatgtgagtgcccctca

SEQ ID NO: 227 - DNA, 41 bp, homo sapiens
gtctcctttgcagaacagtctagtgttacactgagtccagt

SEQ ID NO: 228 - DNA, 41 bp, homo sapiens
ccagatttcccctcaccaccctcccccaagggggcacccaa

SEQ ID NO: 229 - DNA, 41 bp, homo sapiens
ggccactgacaaggcctcagtccaagctgagcctcatccta

SEQ ID NO: 230 - DNA, 41 bp, homo sapiens
agaaagggttggagtgagggctggggcccgagtctcttttt

SEQ ID NO: 231 - DNA, 41 bp, homo sapiens
agcactccccaggccacccctcttttattataccctctatg

SEQ ID NO: 232 - DNA, 41 bp, homo sapiens
tttgtttgaggaaagggttttgctgctttttaagaggatgc

SEQ ID NO: 233 - DNA, 41 bp, homo sapiens
cctgccagtcctctgaaaacgcccctgtgccatggagacct

SEQ ID NO: 234 - DNA, 41 bp, homo sapiens
tagagagcattgccacgaaacggtggcaaatctcacgtctg

SEQ ID NO: 235 - DNA, 41 bp, homo sapiens
ttgcaaaccttagcatgcacgtgagtcacctgggatgcttg

SEQ ID NO: 236 - DNA, 41 bp, homo sapiens
gaagcccaggccccagaggttctcccaccaaggcctcccac

SEQ ID NO: 237 - DNA, 41 bp, homo sapiens
aggccccagaggtcctcccatcaaggcctcccacgtgaccc

SEQ ID NO: 238 - DNA, 41 bp, homo sapiens
ggcctcccacgtgacccagtacagggttaggctgcccttct

SEQ ID NO: 239 - DNA, 41 bp, homo sapiens
ggaaaggcctgaaggaagagcccggggaaagagccctccct

SEQ ID NO: 240 - DNA, 41 bp, homo sapiens
accctctgtctgctcgagcctaggaaaggcctgaaggaaga

SEQ ID NO: 241 - DNA, 41 bp, homo sapiens
cttgcctcaggcagatcagcgttaaatattccttgtcaatt

SEQ ID NO: 242 - DNA, 41 bp, homo sapiens
actgataccatgtttatgtcgtcctttctagggccagtggg

SEQ ID NO: 243 - DNA, 41 bp, homo sapiens
aaataaataataaaagccagcgccaatctggtgtgtgccag

SEQ ID NO: 244 - DNA, 41 bp, homo sapiens
ctcctctggctcctcctcccatcctccatatcacctcttcc

SEQ ID NO: 245 - DNA, 41 bp, homo sapiens
acctcttggcagcttggcttggagaggctgtcaccccttct

SEQ ID NO: 246 - DNA, 41 bp, homo sapiens
cctatggagaaggtcccaggacccaggaacacagggcttct

SEQ ID NO: 247 - DNA, 41 bp, homo sapiens
ccggggttgtataccacaccgtgggcccctaatcccaggcc

SEQ ID NO: 248 - DNA, 41 bp, homo sapiens
cagatgagccagcattccagttctttcacccttcagcaaca

SEQ ID NO: 249 - DNA, 41 bp, homo sapiens
aatttatgtctttgtgggccagctcttcaggaccaaggtct

SEQ ID NO: 250 - DNA, 41 bp, homo sapiens
ctgctgcacagagtgctgccaacatttatcatctccatctg

SEQ ID NO: 251 - DNA, 41 bp, homo sapiens
agaagcttggctttcttatcgattctttgtgacataataaa

SEQ ID NO: 252 - DNA, 41 bp, homo sapiens
tgttgttgttgagacagggtttcagtccgtcggcccagact

SEQ ID NO: 253 - DNA, 41 bp, homo sapiens
atagtgctaggattataggcatggccactgcgcctggcccc

SEQ ID NO: 254 - DNA, 41 bp, homo sapiens
caaatctgcagggctcccccgaccgcgcccaggtgggcccc

SEQ ID NO: 255 - DNA, 41 bp, homo sapiens
aaatctgcagggctccccccgccgcgcccaggtgggcccct

SEQ ID NO: 256 - DNA, 41 bp, homo sapiens
aagggctggctgaggtcatgatccccctctgagactcagtt

SEQ ID NO: 257 - DNA, 41 bp, homo sapiens
cagggagagctgggatgaggtctggggtgctgcctgtgggg

SEQ ID NO: 258 - DNA, 41 bp, homo sapiens
tgaggcctggggtgctgcctatggggacagcacgcatgctt

SEQ ID NO: 259 - DNA, 41 bp, homo sapiens
tgctgccagggcccgaagacacagcacagttttttctccag

SEQ ID NO: 260 - DNA, 41 bp, homo sapiens
gccctggagggagcagggggcttgtgggacacagacttgga

SEQ ID NO: 261 - DNA, 41 bp, homo sapiens
gggaactgaggcagggacaggtggttgtgcaatagttattg

SEQ ID NO: 262 - DNA, 41 bp, homo sapiens
tcccagttacgtctgcgtaaagatgcctcacatgtacgtag

SEQ ID NO: 263 - DNA, 41 bp, homo sapiens
tgacaggtggaagggagccagtgagcacctactgtgtgcca

SEQ ID NO: 264 - DNA, 41 bp, homo sapiens
ataacagctcattgagtcttgcacaggacagatgttcttta

SEQ ID NO: 265 - DNA, 41 bp, homo sapiens
gctcattgagtctttcacagtacagatgttctttatcaggg

SEQ ID NO: 266 - DNA, 41 bp, homo sapiens
aagagagtctcagaccatcatgtgctctggtgctgaatgac

SEQ ID NO: 267 - DNA, 41 bp, homo sapiens
gccgatggtgaacaccattgtcattccttttcacactcttc

SEQ ID NO: 268 - DNA, 41 bp, homo sapiens
tatggagacagactaggcaaattttgtttaataaatgagtg

SEQ ID NO: 269 - DNA, 41 bp, homo sapiens
tgagcgatgagccccaggtttctggcatggatggatggatg

SEQ ID NO: 270 - DNA, 41 bp, homo sapiens
gcgaagacagcggcgatggggaagaagttgtggaacttgca

SEQ ID NO: 271 - DNA, 41 bp, homo sapiens
agcaggagagccaggacccatatgacacagatgaccacttt

SEQ ID NO: 272 - DNA, 41 bp, homo sapiens
gggtgggttagttctgcctggcccctgctcaccttgcgctt

SEQ ID NO: 273 - DNA, 41 bp, homo sapiens
cagaatggaatgaatgggctcttgggaaaagctggtccgac

SEQ ID NO: 274 - DNA, 41 bp, homo sapiens
cagtgatttggtttgagtcaaacagcatgagggtggcaaag

SEQ ID NO: 275 - DNA, 41 bp, homo sapiens
ctgaccctttttgcaagtcctagtgtgagggtgtttctgat

SEQ ID NO: 276 - DNA, 41 bp, homo sapiens
ttggaggtcaggtccagggatgagggtgtggccttggggcc

SEQ ID NO: 277 - DNA, 41 bp, homo sapiens
cgctggggaaagaaaggacaaagggaatgttggagctacag

SEQ ID NO: 278 - DNA, 41 bp, homo sapiens
gcggtaggaagactgttaaggtgcatctcttattttctagg

SEQ ID NO: 279 - DNA, 41 bp, homo sapiens
cgcatcaaagtgacgaccagtcaggatatgctctcaatcat

SEQ ID NO: 280 - DNA, 41 bp, homo sapiens
tatctccaagatgctattcgctgaacccatcctggaggttt

SEQ ID NO: 281 - DNA, 41 bp, homo sapiens
gctctaccacgccttctcaggaatgaagaaggtggagacca

SEQ ID NO: 282 - DNA, 41 bp, homo sapiens
tgcagcagcccttcctcttcatgctctgggaccagcagcac

SEQ ID NO: 283 - DNA, 41 bp, homo sapiens
tcctgcctaatgatgagtgcgaaaaagcccacgtccagaag

SEQ ID NO: 284 - DNA, 41 bp, homo sapiens
cagactgtgtagcccaaggcagggatggggactcctgcgtc

SEQ ID NO: 285 - DNA, 41 bp, homo sapiens
aggtcgtggagttgcccacccaggaacccgaagtggggagc

SEQ ID NO: 286 - DNA, 41 bp, homo sapiens
ggcggggatggggactcctgtgtccaagggagaaagggcca

SEQ ID NO: 287 - DNA, 41 bp, homo sapiens
gggccaccccagctgtgtcagtctcatgcctggaagtctga

SEQ ID NO: 288 - DNA, 41 bp, homo sapiens
tgtcacgttctgccatcacccatctttccagatgtggtgca

SEQ ID NO: 289 - DNA, 1082 bp, homo sapiens
  misc_feature (956)..(956): wherein N is either a "G" or an "A".
  misc_feature (129)..(129): wherein N is either a "T" or a "C".
  misc_feature (348)..(348): wherein N is either a "C" or a "T".
  misc_feature (462)..(462): wherein N is either a "G" or an "A".
  misc_feature (577)..(577): wherein N is either a "C" or a "G".
  misc_feature (705)..(705): wherein N is either a "G" or an "A".
ctgtgcatggcatcatcctggccccctctagagctccaatcctccaaccagagccagctcttccctcaaaatgctacggcctgtgacaatgctccagaagcctgggacctgctgcacagagtgctgccnacatttatcatctccatctgtttcttcggcctcctagggaacctttttgtcctgttggtcttcctcctgccccggcggcaactgaacgtggcagaaatctacctggccaacctggcagcctctgatctggtgtttgtcttgggcttgcccttctgggcagagaatatctggaaccagtttaactggcctttcggagccctcctctgccgtgtcatcaanggggtcatcaaggccaatttgttcatcagcatcttcctggtggtggccatcagccaggaccgctaccgcgtgctggtgcaccctatggccagcggaaggcagcagcggcggagncaggcccgggtcacctgcgtgctcatctgggttgtggggggcctcttgagcatccccacattcctgctgcgatccatccaagccgtcccagatctgaacatcaccgcctgcatcntgctcctcccccatgaggcctggcactttgcaaggattgtggagttaaatattctgggtttcctcctaccactggctgcgatcgtcttcttcaactaccacatcctggcctccctgcgaacgcgggangaggtcagcaggacaagagtgcnggggccgaaggatagcaagaccacagcgctgatcctcacgctcgtggttgccttcctggtctgctgggccccttaccacttctttgccttcctggaattcttattccaggtgcaagcagtccgaggctgcttttgggaggacttcattgacctgggcctgcaattggccaacttctttgccttcactaacagctccctgaatccagtaatttatgtctttgtgggccngctcttcaggaccaaggtctgggaactttataaacaatgcacccctaaaagtcttgctccaatatcttcatcccataggaaagaaatcttccaacttttctggcggaattaaaacagcattgaacc

SEQ ID NO: 290 - protein, 353 aa, homo sapiens
  VARIANT (317)..(317): wherein Xaa is either "Arg" or "Gln".
  VARIANT (241)..(241): wherein Xaa is either "Arg" or "Asn".
  VARIANT (191)..(191): wherein Xaa is either "Leu" or "Val".
MASSWPPLELQSSNQSQLFPQNATACDNAPEAWDLLHRVLPTFIISICFFGLLGNLFVLLVFLLPRRQLNVAEIYLANLAASDLVFVLGLPFWAENIWNQFNWPFGALLCRVINGVIKANLFISIFLVVAISQDRYRVLVHPMASGRQQRRRQARVTCVLIWVVGGLLSIPTFLLRSIQAVPDLNITACIXLLPHEAWHFARIVELNILGFLLPLAAIVFFNYHILASLRTREEVSRTRVXGPKDSKTTALILTLVVAFLVCWAPYHFFAFLEFLFQVQAVRGCFWEDFIDLGLQLANFFAFTNSSLNPVIYVFVGXLFRTKVWELYKQCTPKSLAPISSSHRKEIFQLFWRN

SEQ ID NO: 291 - DNA, 1766 bp, homo sapiens
  CDS (211)..(1431)
  misc_feature (543)..(543): wherein N is either a "T" or a "C".
  misc_feature (672)..(672): wherein N is either a "C" or an "A".
  misc_feature (1344)..(1344): wherein N is either a "G" or an "A".
aattcagagccaccgcgggcaggcgggcagtgcatccagaagcgtttatattctgagcgccagttcagctttcaaaaagagtgctgcccataaaaagccttccaccctcctgtctgctttagaaggaccctgagccccaggcgccagccacaggactctgctgcagaggggggttgtgtacagatagtaggctttacgcctagcttcgaaatggataacgtcctcccggtggactcagacctctccccaaacatctccactaacacctcggaacccaatcagttcgtgcaaccagcctggcaaattgtcctttgggcagctgcctacacggtcattgtggtgacctctgtggtgggcaacgtggtagtgatgtggatcatcttagcccacaaaagaatgaggacagtgacgaactattttctggtgaacctggccttcgcggaggcctccatggctgcattcaatacagtggtgaacttcacctatgctgtccacaacgaatggtactacggcctgttctactgcaagttccacaacttcttncccatcgccgctgtcttcgccagtatctactccatgacggctgtggcctttgataggtacatggccatcatacatcccctccagccccggctgtcagccacagccaccaaagtggtcatctgtgtcatntgggtcctggctctcctgctggccttcccccagggctactactcaaccacagagaccatgcccagcagagtcgtgtgcatgatcgaatggccagagcatccgaacaagatttatgagaaagtgtaccacatctgtgtgactgtgctgatctacttcctccccctgctggtgattggctatgcatacaccgtagtgggaatcacactatgggccagtgagatccccggggactcctctgaccgctaccacgagcaagtctctgccaagcgcaaggtggtcaaaatgatgattgtcgtggtgtgcaccttcgccatctgctggctgcccttccacatcttcttcctcctgccctacatcaacccagatctctacctgaagaagtttatccagcaggtctacctggccatcatgtggctggccatgagctccaccatgtacaaccccatcatctactgctgcctcaatgacaggttccgtctgggcttcaagcatgccttccggtgctgccccttcatcagcgccggcgactatgaggggctggaaatgaaatccacccggtatctccagacccagggcagtgtgtacaaagtcagccgcctggagaccaccatctccacagtggtgggggcccacgaggaggagccagaggacggccccaaggccacaccctcntccctggacctgacctccaactgctcttcacgaagtgactccaagaccatgacagagagcttcagcttctcctccaatgtgctctcctaggccacagggcctttggcaggtgcagcccccactgcctttgacctgcctcccttcatgcatggaaattcccttcatctggaaccatcagaaacaccctcacactgggacttgcaaaaagggtcagtatgggttagggaaaacattccatccttgagtcaaaaaatctcaattcttccctatctttgccaccctcatgctgtgtgactcaaaccaaatcactgaactttgctgagcctgtaaaataaaaggtcggaccagcttttcctcaagagcccaatgcattccatttctggaagtgactttggctgcatgcgagtgctcatttcaggatg

SEQ ID NO: 292 - protein, 407 aa, homo sapiens
  misc_feature (543)..(543): wherein N is either a "T" or a "C".
  misc_feature (672)..(672): wherein N is either a "C" or an "A".
  misc_feature (1344)..(1344): wherein N is either a "G" or an "A".
MDNVLPVDSDLSPNISTNTSEPNQFVQPAWQIVLWAAAYTVIVVTSVVGNVVVMWIILAHKRMRTVTNYFLVNLAFAEASMAAFNTVVNFTYAVHNEWYYGLFYCKFHNFXPIAAVFASIYSMTAVAFDRYMAIIHPLQPRLSATATKVVICVXWVLALLLAFPQGYYSTTETMPSRVVCMIEWPEHPNKIYEKVYHICVTVLIYFLPLLVIGYAYTVVGITLWASEIPGDSSDRYHEQVSAKRKVVKMMIVVVCTFAICWLPFHIFFLLPYINPDLYLKKFIQQVYLAIMWLAMSSTMYNPIIYCCLNDRFRLGFKHAFRCCPFISAGDYEGLEMKSTRYLQTQGSVYKVSRLETTISTVVGAHEEEPEDGPKATPXSLDLTSNCSSRSDSKTMTESFSFSSNVLS

SEQ ID NO: 293 - DNA, 1826 bp, homo sapiens
  misc_feature (1278)..(1278): wherein N is either a "C" or a "T".
  misc_feature (227)..(227): wherein N is either a "T" or a "C".
  misc_feature (536)..(536): wherein N is either a "C" or a "G".
  misc_feature (1498)..(1498): wherein N is either a "G" or an "A".
agtctgcactggagctgcctggtgaccagaagtttggagtccgctgacgtcgccgcccagatggcctccaggctgaccctgctgaccctcctgctgctgctgctggctggggatagagcctcctcaaatccaaatgctaccagctccagctcccaggatccagagagtttgcaagacagaggcgaagggaaggtcgcaacaacagttatctccaagatgctattcgntgaacccatcctggaggtttccagcttgccgacaaccaactcaacaaccaattcagccaccaaaataacagctaataccactgatgaacccaccacacaacccaccacagagcccaccacccaacccaccatccaacccacccaaccaactacccagctcccaacagattctcctacccagcccactactgggtccttctgcccaggacctgttactctctgctctgacttggagagtcattcaacagaggccgtgttgggggatgctttggtagatttctccctgaagctctaccacgccttctcagnaatgaagaaggtggagaccaacatggccttttccccattcagcatcgccagcctccttacccaggtcctgctcggggctgggcagaacaccaaaacaaacctggagagcatcctctcttaccccaaggacttcacctgtgtccaccaggccctgaagggcttcacgaccaaaggtgtcacctcagtctctcagatcttccacagcccagacctggccataagggacacctttgtgaatgcctctcggaccctgtacagcagcagccccagagtcctaagcaacaacagtgacgccaacttggagctcatcaacacctgggtggccaagaacaccaacaacaagatcagccggctgctagacagtctgccctccgatacccgccttgtcctcctcaatgctatctacctgagtgccaagtggaagacaacatttgatcccaagaaaaccagaatggaaccctttcacttcaaaaactcagttataaaagtgcccatgatgaatagcaagaagtaccctgtggcccatttcattgaccaaactttgaaagccaaggtggggcagctgcagctctcccacaatctgagtttggtgatcctggtaccccagaacctgaaacatcgtcttgaagacatggaacaggctctcagcccttctgttttcaaggccatcatggagaaactggagatgtccaagttccagcccactctcctaacactaccccgcatcaaagtgacgaccagncaggatatgctctcaatcatggagaaattggaattcttcgatttttcttatgaccttaacctgtgtgggctgacagaggacccagatcttcaggtttctgcgatgcagcaccagacagtgctggaactgacagagactggggtggaggcggctgcagcctccgccatctctgtggcccgcaccctgctggtctttgaagtgcagcagcccttcctcttcntgctctgggaccagcagcacaagttccctgtcttcatggggcgagtatatgaccccagggcctgagacctgcaggatcaggttagggcgagcgctacctctccagcctcagctctcagttgcagccctgctgctgcctgcctggacttgcccctgccacctcctgcctcaggtgtccgctatccaccaaaagggctcctgagggtctgggcaagggacctgcttctattagcccttctccatggccctgccatgctctccaaaccactttttgcagctttctctagttcaagttcaccagactctataaataaaacctgacagaccat

SEQ ID NO: 294 - protein, 500 aa, homo sapiens
  VARIANT (56)..(56): wherein Xaa is either "Val" or "Ala".
  VARIANT (159)..(159): wherein Xaa is either "Ala" or "Gly".
  VARIANT (480)..(480): wherein Xaa is either "Val" or "Met".
MASRLTLLTLLLLLLAGDRASSNPNATSSSSQDPESLQDRGEGKVATTVISKMLFXEPILEVSSLPTTNSTTNSATKITANTTDEPTTQPTTEPTTQPTIQPTQPTTQLPTDSPTQPTTGSFCPGPVTLCSDLESHSTEAVLGDALVDFSLKLYHAFSXMKKVETNMAFSPFSIASLLTQVLLGAGQNTKTNLESILSYPKDFTCVHQALKGFTTKGVTSVSQIFHSPDLAIRDTFVNASRTLYSSSPRVLSNNSDANLELINTWVAKNTNNKISRLLDSLPSDTRLVLLNAIYLSAKWKTTFDPKKTRMEPFHFKNSVIKVPMMNSKKYPVAHFIDQTLKAKVGQLQLSHNLSLVILVPQNLKHRLEDMEQALSPSVFKAIMEKLEMSKFQPTLLTLPRIKVTTSQDMLSIMEKLEFFDFSYDLNLCGLTEDPDLQVSAMQHQTVLELTETGVEAAAASAISVARTLLVFEVQQPFLFXLWDQQHKFPVFMGRVYDPRA

SEQ ID NO: 295 - DNA, 871 bp, homo sapiens
  misc_feature (592)..(592): wherein N is either an "A" or a "G".
  misc_feature (469)..(469): wherein N is either a "G" or a "C".
tcctccacctgctggcccctggacacctctgtcaccatgtggttcctggttctgtgcctcgccctgtccctgggggggactggtgctgcgcccccgattcagtcccggattgtgggaggctgggagtgtgagcagcattcccagccctggcaggcggctctgtaccatttcagcactttccagtgtgggggcatcctggtgcaccgccagtgggtgctcacagctgctcattgcatcagcgacaattaccagctctggctgggtcgccacaacttgtttgacgacgaaaacacagcccagtttgttcatgtcagtgagagcttcccacaccctggcttcaacatgagcctcctggagaaccacacccgccaagcagacgaggactacagccacgacctcatgctgctccgcctgacagagcctgctgataccatcacagatgctgtgaaggtcgtggagttgcccaccnaggaacccgaagtggggagcacctgtttggcttccggctggggcagcatcgaaccagagaatttctcatttccagatgatctccagtgtgtggacctcaaaatcctgcctaatgatgagtgcnaaaaagcccacgtccagaaggtgacagacttcatgctgtgtgtcggacacctggaaggtggcaaagacacctgtgtgggtgattcagggggcccgctgatgtgtgatggtgtgctccaaggtgtcacatcatggggctacgtcccttgtggcacccccaataagccttctgtcgccgtcagagtgctgtcttatgtgaagtggatcgaggacaccatagcggagaactcctgaacgcccagccctgtcccctacccccagtaaaatcaaatgtgcatcc

SEQ ID NO: 296 - protein, 262 aa, homo sapiens
  VARIANT (145)..(145): wherein Xaa is either "Glu" or "Asn".
  VARIANT (186)..(186): wherein Xaa is either "Lys" or "Glu".
MWFLVLCLALSLGGTGAAPPIQSRIVGGWECEQHSQPWQAALYHFSTFQCGGILVHRQWVLTAAHCISDNYQLWLGRHNLFDDENTAQFVHVSESFPHPGFNMSLLENHTRQADEDYSHDLMLLRLTEPADTITDAVKVVELPTXEPEVGSTCLASGWGSIEPENFSFPDDLQCVDLKILPNDECXKAHVQKVTDFMLCVGHLEGGKDTCVGDSGGPLMCDGVLQGVTSWGYVPCGTPNKPSVAVRVLSYVKWIEDTIAENS

SEQ ID NO: 297 - DNA, 21 bp, homo sapiens
cagcccaggcatcttaatcta

SEQ ID NO: 298 - DNA, 20 bp, homo sapiens
agtgctccttccttcccttc

SEQ ID NO: 299 - DNA, 21 bp, homo sapiens
tagctgtcttcttcctttcgc

SEQ ID NO: 300 - DNA, 21 bp, homo sapiens
tagctgtcttcttcctttcgc

SEQ ID NO: 301 - DNA, 21 bp, homo sapiens
tgattgagaccagctgttgtg

SEQ ID NO: 302 - DNA, 18 bp, homo sapiens
ccagcgtgggcatacatg

SEQ ID NO: 303 - DNA, 18 bp, homo sapiens
ccagcgtgggcatacatg

SEQ ID NO: 304 - DNA, 21 bp, homo sapiens
cttcctttgacctccaggaac

SEQ ID NO: 305 - DNA, 21 bp, homo sapiens
cttcctttgacctccaggaac

SEQ ID NO: 306 - DNA, 18 bp, homo sapiens
ccagcgtgggcatacatg

SEQ ID NO: 307 - DNA, 21 bp, homo sapiens
taaatgacaggtcagggcttg

SEQ ID NO: 308 - DNA, 21 bp, homo sapiens
taaatgacaggtcagggcttg

SEQ ID NO: 309 - DNA, 21 bp, homo sapiens
taaatgacaggtcagggcttg

SEQ ID NO: 310 - DNA, 21 bp, homo sapiens
tgattgagaccagctgttgtg

SEQ ID NO: 311 - DNA, 21 bp, homo sapiens
tgattgagaccagctgttgtg

SEQ ID NO: 312 - DNA, 22 bp, homo sapiens
ggcccatgtcattaatgagtac

SEQ ID NO: 313 - DNA, 21 bp, homo sapiens
ccctcttcttaggcaccactc

SEQ ID NO: 314 - DNA, 21 bp, homo sapiens
ccctcttcttaggcaccactc

SEQ ID NO: 315 - DNA, 21 bp, homo sapiens
tagctgtcttcttcctttcgc

SEQ ID NO: 316 - DNA, 21 bp, homo sapiens
ggactatggtgacagctggag

SEQ ID NO: 317 - DNA, 21 bp, homo sapiens
ggactatggtgacagctggag

SEQ ID NO: 318 - DNA, 21 bp, homo sapiens
gaggctccagactctcctgtt

SEQ ID NO: 319 - DNA, 21 bp, homo sapiens
gaggctccagactctcctgtt

SEQ ID NO: 320 - DNA, 21 bp, homo sapiens
cactttgcaaggattgtggag

SEQ ID NO: 321 - DNA, 21 bp, homo sapiens
tggctctgtgccaataaaact

SEQ ID NO: 322 - DNA, 20 bp, homo sapiens
aggaccaaggtctgggaact

SEQ ID NO: 323 - DNA, 21 bp, homo sapiens
gctgccaggaagattaaatga

SEQ ID NO: 324 - DNA, 21 bp, homo sapiens
acttcccagactcaagggatc

SEQ ID NO: 325 - DNA, 21 bp, homo sapiens
cgactaggtcctcaccagaca

SEQ ID NO: 326 - DNA, 21 bp, homo sapiens
cgactaggtcctcaccagaca

SEQ ID NO: 327 - DNA, 21 bp, homo sapiens
gcaggcaaataccactttcaa

SEQ ID NO: 328 - DNA, 21 bp, homo sapiens
gcaggcaaataccactttcaa

SEQ ID NO: 329 - DNA, 21 bp, homo sapiens
gcaggcaaataccactttcaa

SEQ ID NO: 330 - DNA, 21 bp, homo sapiens
gcaggcaaataccactttcaa

SEQ ID NO: 331 - DNA, 21 bp, homo sapiens
gctctttctggaaggtccact

SEQ ID NO: 332 - DNA, 21 bp, homo sapiens
ggtctcagcactgtgatcctc

SEQ ID NO: 333 - DNA, 21 bp, homo sapiens
ggtctcagcactgtgatcctc

SEQ ID NO: 334 - DNA, 21 bp, homo sapiens
ggtctcagcactgtgatcctc

SEQ ID NO: 335 - DNA, 21 bp, homo sapiens
tctacatgccagaagcctgtt

SEQ ID NO: 336 - DNA, 21 bp, homo sapiens
tctacatgccagaagcctgtt

SEQ ID NO: 337 - DNA, 21 bp, homo sapiens
tctacatgccagaagcctgtt

SEQ ID NO: 338 - DNA, 21 bp, homo sapiens
cctccagcttctagctcaggt

SEQ ID NO: 339 - DNA, 21 bp, homo sapiens
gcttaatgcttgggtgatgaa

SEQ ID NO: 340 - DNA, 21 bp, homo sapiens
gcttaatgcttgggtgatgaa

SEQ ID NO: 341 - DNA, 21 bp, homo sapiens
cgtggtcctctatgagcactt

SEQ ID NO: 342 - DNA, 23 bp, homo sapiens
gggtatatgtgagaaatgcttgc

SEQ ID NO: 343 - DNA, 21 bp, homo sapiens
ctgggttccaaagacactgaa

SEQ ID NO: 344 - DNA, 21 bp, homo sapiens
ctgcaggaggctaatctgaga

SEQ ID NO: 345 - DNA, 21 bp, homo sapiens
ctgcaggaggctaatctgaga

SEQ ID NO: 346 - DNA, 21 bp, homo sapiens
ctgcaggaggctaatctgaga

SEQ ID NO: 347 - DNA, 21 bp, homo sapiens
acccatactgaccctttttgc

SEQ ID NO: 348 - DNA, 20 bp, homo sapiens
aataccctccattccagcct

SEQ ID NO: 349 - DNA, 20 bp, homo sapiens
gtcttcccattctgggtcct

SEQ ID NO: 350 - DNA, 21 bp, homo sapiens
cactgttcacccagctggtat

SEQ ID NO: 351 - DNA, 21 bp, homo sapiens
agattgctcatctgctgcact

SEQ ID NO: 352 - DNA, 21 bp, homo sapiens
ttcagccaccaaaataacagc

SEQ ID NO: 353 - DNA, 21 bp, homo sapiens
gaacccagagaattcaggaca

SEQ ID NO: 354 - DNA, 21 bp, homo sapiens
gactacagccacgacctcatg

SEQ ID NO: 355 - DNA, 21 bp, homo sapiens
gactacagccacgacctcatg

SEQ ID NO: 356 - DNA, 21 bp, homo sapiens
gactacagccacgacctcatg

SEQ ID NO: 357 - DNA, 21 bp, homo sapiens
gactacagccacgacctcatg

SEQ ID NO: 358 - DNA, 18 bp, homo sapiens
gctccccaggcagaactt

SEQ ID NO: 359 - DNA, 18 bp, homo sapiens
gctccccaggcagaactt

SEQ ID NO: 360 - DNA, 21 bp, homo sapiens
tattcactacctggggttggg

SEQ ID NO: 361 - DNA, 21 bp, homo sapiens
tctctacttccctccctttgc

SEQ ID NO: 362 - DNA, 21 bp, homo sapiens
ataggatgaggctcagcttgg

SEQ ID NO: 363 - DNA, 21 bp, homo sapiens
ataggatgaggctcagcttgg

SEQ ID NO: 364 - DNA, 21 bp, homo sapiens
aacagaaaaagagactcgggc

SEQ ID NO: 365 - DNA, 19 bp, homo sapiens
ggccctgaaatctgcattt

SEQ ID NO: 366 - DNA, 19 bp, homo sapiens
ggccctgaaatctgcattt

SEQ ID NO: 367 - DNA, 21 bp, homo sapiens
cctgtttcctcttctggctct

SEQ ID NO: 368 - DNA, 21 bp, homo sapiens
cctgtttcctcttctggctct

SEQ ID NO: 369 - DNA, 19 bp, homo sapiens
ggccctgaaatctgcattt

SEQ ID NO: 370 - DNA, 21 bp, homo sapiens
cagctctcaggccttttcatt

SEQ ID NO: 371 - DNA, 21 bp, homo sapiens
cagctctcaggccttttcatt

SEQ ID NO: 372 - DNA, 21 bp, homo sapiens
cagctctcaggccttttcatt

SEQ ID NO: 373 - DNA, 21 bp, homo sapiens
aacagaaaaagagactcgggc

SEQ ID NO: 374 - DNA, 21 bp, homo sapiens
aacagaaaaagagactcgggc

SEQ ID NO: 375 - DNA, 21 bp, homo sapiens
tcagggctaccttttgtcctt

SEQ ID NO: 376 - DNA, 21 bp, homo sapiens
ctgctggcattcctcacttac

SEQ ID NO: 377 - DNA, 21 bp, homo sapiens
ctgctggcattcctcacttac

SEQ ID NO: 378 - DNA, 21 bp, homo sapiens
ataggatgaggctcagcttgg

SEQ ID NO: 379 - DNA, 20 bp, homo sapiens
caagaagccctgtgttcctg

SEQ ID NO: 380 - DNA, 20 bp, homo sapiens
caagaagccctgtgttcctg

SEQ ID NO: 381 - DNA, 22 bp, homo sapiens
ttaggaatgatgggttcacatg

SEQ ID NO: 382 - DNA, 22 bp, homo sapiens
ttaggaatgatgggttcacatg

SEQ ID NO: 383 - DNA, 21 bp, homo sapiens
aagaaagccaagcttcttggt

SEQ ID NO: 384 - DNA, 19 bp, homo sapiens
caccaccaggaagatgctg

SEQ ID NO: 385 - DNA, 21 bp, homo sapiens
tggaggccagaaatcctaaat

SEQ ID NO: 386 - DNA, 21 bp, homo sapiens
atctcagtactttgggaggcc

SEQ ID NO: 387 - DNA, 20 bp, homo sapiens
cgtggtgtgttcatgcaatt

SEQ ID NO: 388 - DNA, 20 bp, homo sapiens
ctcagtgtccagggaaatgc

SEQ ID NO: 389 - DNA, 20 bp, homo sapiens
ctcagtgtccagggaaatgc

SEQ ID NO: 390 - DNA, 21 bp, homo sapiens
ccgaggttctctggagaaaaa

SEQ ID NO: 391 - DNA, 21 bp, homo sapiens
ccgaggttctctggagaaaaa

SEQ ID NO: 392 - DNA, 21 bp, homo sapiens
ccgaggttctctggagaaaaa

SEQ ID NO: 393 - DNA, 21 bp, homo sapiens
ccgaggttctctggagaaaaa

SEQ ID NO: 394 - DNA, 21 bp, homo sapiens
ataccaacagcttccccagtt

SEQ ID NO: 395 - DNA, 21 bp, homo sapiens
caaagactcaagtgggaacga

SEQ ID NO: 396 - DNA, 21 bp, homo sapiens
caaagactcaagtgggaacga

SEQ ID NO: 397 - DNA, 21 bp, homo sapiens
caaagactcaagtgggaacga

SEQ ID NO: 398 - DNA, 21 bp, homo sapiens
ccactctcctctgcctcagta

SEQ ID NO: 399 - DNA, 21 bp, homo sapiens
ccactctcctctgcctcagta

SEQ ID NO: 400 - DNA, 21 bp, homo sapiens
ccactctcctctgcctcagta

SEQ ID NO: 401 - DNA, 21 bp, homo sapiens
gcagaatcagtattgggagcc

SEQ ID NO: 402 - DNA, 21 bp, homo sapiens
ctagaatcataggcgcagcag

SEQ ID NO: 403 - DNA, 21 bp, homo sapiens
ctagaatcataggcgcagcag

SEQ ID NO: 404 - DNA, 21 bp, homo sapiens
catctccactaacacctcgga

SEQ ID NO: 405 - DNA, 22 bp, homo sapiens
tcatcaggaatcaaagggtttc

SEQ ID NO: 406 - DNA, 21 bp, homo sapiens
tatgcaggtgacaagtctccc

SEQ ID NO: 407 - DNA, 21 bp, homo sapiens
tccaactgctcttcacgaagt

SEQ ID NO: 408 - DNA, 21 bp, homo sapiens
tccaactgctcttcacgaagt

SEQ ID NO: 409 - DNA, 21 bp, homo sapiens
tccaactgctcttcacgaagt

SEQ ID NO: 410 - DNA, 21 bp, homo sapiens
taacaagctgatgcagtggtg

SEQ ID NO: 411 - DNA, 21 bp, homo sapiens
tggagtgacctaatgctcctg

SEQ ID NO: 412 - DNA, 22 bp, homo sapiens
ggtggaaatacagatggaagga

SEQ ID NO: 413 - DNA, 21 bp, homo sapiens
acatcttagggatcccccttt

SEQ ID NO: 414 - DNA, 21 bp, homo sapiens
agtagtgggctgggtaggaga

SEQ ID NO: 415 - DNA, 21 bp, homo sapiens
tggattggtgactcttatggg

SEQ ID NO: 416 - DNA, 20 bp, homo sapiens
gtggatagcggacacctgag

SEQ ID NO: 417 - DNA, 21 bp, homo sapiens
gctctcagaagccagttcaga

SEQ ID NO: 418 - DNA, 21 bp, homo sapiens
gctctcagaagccagttcaga

SEQ ID NO: 419 - DNA, 21 bp, homo sapiens
gctctcagaagccagttcaga

SEQ ID NO: 420 - DNA, 21 bp, homo sapiens
gctctcagaagccagttcaga

SEQ ID NO: 421 - DNA, 21 bp, homo sapiens
ctgctggtgacctcagacttc

SEQ ID NO: 422 - DNA, 21 bp, homo sapiens
ctgctggtgacctcagacttc

SEQ ID NO: 423 - DNA, 21 bp, homo sapiens
agttcctcctcctccctcact

SEQ ID NO: 424 - DNA, 21 bp, homo sapiens
cagtaacatcagttgccaccc

SEQ ID NO: 425 - DNA, 21 bp, homo sapiens
cacttgtggaaagcacacaga

SEQ ID NO: 426 - DNA, 21 bp, homo sapiens
cacttgtggaaagcacacaga

SEQ ID NO: 427 - DNA, 23 bp, homo sapiens
cctctgtctctgagatctttgga

SEQ ID NO: 428 - DNA, 21 bp, homo sapiens
gcaaagggaaccaggactaac

SEQ ID NO: 429 - DNA, 21 bp, homo sapiens
gcaaagggaaccaggactaac

SEQ ID NO: 430 - DNA, 21 bp, homo sapiens
ctttgcatccttagcagatgc

SEQ ID NO: 431 - DNA, 21 bp, homo sapiens
ctttgcatccttagcagatgc

SEQ ID NO: 432 - DNA, 21 bp, homo sapiens
gcaaagggaaccaggactaac

SEQ ID NO: 433 - DNA, 21 bp, homo sapiens
agttgagaggtagaggcagcc

SEQ ID NO: 434 - DNA, 21 bp, homo sapiens
agttgagaggtagaggcagcc

SEQ ID NO: 435 - DNA, 21 bp, homo sapiens
agttgagaggtagaggcagcc

SEQ ID NO: 436 - DNA, 23 bp, homo sapiens
cctctgtctctgagatctttgga

SEQ ID NO: 437 - DNA, 23 bp, homo sapiens
cctctgtctctgagatctttgga

SEQ ID NO: 438 - DNA, 21 bp, homo sapiens
agggtttcgctgctttttaag

SEQ ID NO: 439 - DNA, 21 bp, homo sapiens
caaggtggacagtcttcggta

SEQ ID NO: 440 - DNA, 21 bp, homo sapiens
caaggtggacagtcttcggta

SEQ ID NO: 441 - DNA, 21 bp, homo sapiens
cacttgtggaaagcacacaga

SEQ ID NO: 442 - DNA, 21 bp, homo sapiens
caagacttcacctcttggcag

SEQ ID NO: 443 - DNA, 21 bp, homo sapiens
caagacttcacctcttggcag

SEQ ID NO: 444 - DNA, 21 bp, homo sapiens
actgaacataccccaagagcc

SEQ ID NO: 445 - DNA, 21 bp, homo sapiens
actgaacataccccaagagcc

SEQ ID NO: 446 - DNA, 21 bp, homo sapiens
tctgggtttcctcctaccact

SEQ ID NO: 447 - DNA, 21 bp, homo sapiens
gacaggttggtttggctcata

SEQ ID NO: 448 - DNA, 21 bp, homo sapiens
cacccctaaaagtcttgctcc

SEQ ID NO: 449 - DNA, 21 bp, homo sapiens
gcctggaacacagaccattaa

SEQ ID NO: 450 - DNA, 21 bp, homo sapiens
ctcagcctcctgtagctgaga

SEQ ID NO: 451 - DNA, 21 bp, homo sapiens
gcaccgagagcaataaatgtc

SEQ ID NO: 452 - DNA, 21 bp, homo sapiens
gcaccgagagcaataaatgtc

SEQ ID NO: 453 - DNA, 21 bp, homo sapiens
gcaggcaaataccactttcaa

SEQ ID NO: 454 - DNA, 21 bp, homo sapiens
gcaggcaaataccactttcaa

SEQ ID NO: 455 - DNA, 21 bp, homo sapiens
gcaggcaaataccactttcaa

SEQ ID NO: 456 - DNA, 21 bp, homo sapiens
gcaggcaaataccactttcaa

SEQ ID NO: 457 - DNA, 21 bp, homo sapiens
gagctgaactacgagtcacgg

SEQ ID NO: 458 - DNA, 21 bp, homo sapiens
atcttcctctgcctcatcaca

SEQ ID NO: 459 - DNA, 21 bp, homo sapiens
atcttcctctgcctcatcaca

SEQ ID NO: 460 - DNA, 21 bp, homo sapiens
atcttcctctgcctcatcaca

SEQ ID NO: 461 - DNA, 21 bp, homo sapiens
aaaggcttctgagtgtgcaag

SEQ ID NO: 462 - DNA, 21 bp, homo sapiens
aaaggcttctgagtgtgcaag

SEQ ID NO: 463 - DNA, 21 bp, homo sapiens
aaaggcttctgagtgtgcaag

SEQ ID NO: 464 - DNA, 21 bp, homo sapiens
caggttctagcccttcttggt

SEQ ID NO: 465 - DNA, 21 bp, homo sapiens
tgggagtatgaaacaagtggc

SEQ ID NO: 466 - DNA, 21 bp, homo sapiens
tgggagtatgaaacaagtggc

SEQ ID NO: 467 - DNA, 21 bp, homo sapiens
ttgtgggctaagatgatccac

SEQ ID NO: 468 - DNA, 21 bp, homo sapiens
gaaagaaagagcaagaagggg

SEQ ID NO: 469 - DNA, 21 bp, homo sapiens
cctctcctcctctctgttgct

SEQ ID NO: 470 - DNA, 21 bp, homo sapiens
ggctccaggaaaatgagtctt

SEQ ID NO: 471 - DNA, 21 bp, homo sapiens
ggctccaggaaaatgagtctt

SEQ ID NO: 472 - DNA, 21 bp, homo sapiens
ggctccaggaaaatgagtctt

SEQ ID NO: 473 - DNA, 21 bp, homo sapiens
atggttccagatgaagggaat

SEQ ID NO: 474 - DNA, 21 bp, homo sapiens
ccgactcatcctgcaagtatc

SEQ ID NO: 475 - DNA, 21 bp, homo sapiens
ccccaagttctacaatcggat

SEQ ID NO: 476 - DNA, 21 bp, homo sapiens
aagcctggaagcttaggtctg

SEQ ID NO: 477 - DNA, 21 bp, homo sapiens
tttccacatccacaccttctc

SEQ ID NO: 478 - DNA, 21 bp, homo sapiens
ataccactgatgaacccacca

SEQ ID NO: 479 - DNA, 21 bp, homo sapiens
ctccatcagctgagggtatca

SEQ ID NO: 480 - DNA, 21 bp, homo sapiens
cctgacagagcctgctgatac

SEQ ID NO: 481 - DNA, 21 bp, homo sapiens
cctgacagagcctgctgatac

SEQ ID NO: 482 - DNA, 21 bp, homo sapiens
cctgacagagcctgctgatac

SEQ ID NO: 483 - DNA, 21 bp, homo sapiens
cctgacagagcctgctgatac

SEQ ID NO: 484 - DNA, 21 bp, homo sapiens
ccccgtagacctttctcactc

SEQ ID NO: 485 - DNA, 21 bp, homo sapiens
ccccgtagacctttctcactc

SEQ ID NO: 486 - DNA, 21 bp, homo sapiens
aggctggtctgactggaaagt

SEQ ID NO: 487 - DNA, 21 bp, homo sapiens
tcctgtttgtggtctctgacc

SEQ ID NO: 488 - DNA, 21 bp, homo sapiens
tgtcagtggcctgaaatatcc

SEQ ID NO: 489 - DNA, 21 bp, homo sapiens
tgtcagtggcctgaaatatcc

SEQ ID NO: 490 - DNA, 20 bp, homo sapiens
agaggtcagagctgccttcc

SEQ ID NO: 491 - DNA, 21 bp, homo sapiens
taaacaagcatcccaggtgac

SEQ ID NO: 492 - DNA, 21 bp, homo sapiens
taaacaagcatcccaggtgac

SEQ ID NO: 493 - DNA, 21 bp, homo sapiens
aagaagggaactcactgcaca

SEQ ID NO: 494 - DNA, 21 bp, homo sapiens
aagaagggaactcactgcaca

SEQ ID NO: 495 - DNA, 21 bp, homo sapiens
taaacaagcatcccaggtgac

SEQ ID NO: 496 - DNA, 21 bp, homo sapiens
gcaactccctactccacactg

SEQ ID NO: 497 - DNA, 21 bp, homo sapiens
gcaactccctactccacactg

SEQ ID NO: 498 - DNA, 21 bp, homo sapiens
gcaactccctactccacactg

SEQ ID NO: 499 - DNA, 20 bp, homo sapiens
agaggtcagagctgccttcc

SEQ ID NO: 500 - DNA, 20 bp, homo sapiens
agaggtcagagctgccttcc

SEQ ID NO: 501 - DNA, 21 bp, homo sapiens
cttacccttcttggttcccac

SEQ ID NO: 502 - DNA, 21 bp, homo sapiens
agctgggtaaccttgggtaga

SEQ ID NO: 503 - DNA, 21 bp, homo sapiens
agctgggtaaccttgggtaga

SEQ ID NO: 504 - DNA, 21 bp, homo sapiens
tgtcagtggcctgaaatatcc

SEQ ID NO: 505 - DNA, 21 bp, homo sapiens
tgggaccttctccataggtct

SEQ ID NO: 506 - DNA, 21 bp, homo sapiens
tgggaccttctccataggtct

SEQ ID NO: 507 - DNA, 20 bp, homo sapiens
ggttgatgtttcatgccctg

SEQ ID NO: 508 - DNA, 20 bp, homo sapiens
ggttgatgtttcatgccctg

SEQ ID NO: 509 - DNA, 21 bp, homo sapiens
tcaatgctgttttaattccgc

SEQ ID NO: 510 - DNA, 21 bp, homo sapiens
atgaacaaattggccttgatg

SEQ ID NO: 511 - DNA, 20 bp, homo sapiens
aggacccattccttctggag

SEQ ID NO: 512 - DNA, 21 bp, homo sapiens
ggatcagatgaacccaggagt

SEQ ID NO: 513 - DNA, 21 bp, homo sapiens
tggtgtgttcatgcaatttct

SEQ ID NO: 514 - DNA, 19 bp, homo sapiens
ctttgggattccctccctt

SEQ ID NO: 515 - DNA, 19 bp, homo sapiens
ctttgggattccctccctt

SEQ ID NO: 516 - DNA, 21 bp, homo sapiens
ccgaggttctctggagaaaaa

SEQ ID NO: 517 - DNA, 21 bp, homo sapiens
ccgaggttctctggagaaaaa

SEQ ID NO: 518 - DNA, 21 bp, homo sapiens
ccgaggttctctggagaaaaa

SEQ ID NO: 519 - DNA, 21 bp, homo sapiens
ccgaggttctctggagaaaaa

SEQ ID NO: 520 - DNA, 21 bp, homo sapiens
ggtccacttgtcctccttctt

SEQ ID NO: 521 - DNA, 21 bp, homo sapiens
cagaaagctgttcgacgagac

SEQ ID NO: 522 - DNA, 21 bp, homo sapiens
cagaaagctgttcgacgagac

SEQ ID NO: 523 - DNA, 21 bp, homo sapiens
cagaaagctgttcgacgagac

SEQ ID NO: 524 - DNA, 21 bp, homo sapiens
tggaggaagaaaacaggtgaa

SEQ ID NO: 525 - DNA, 21 bp, homo sapiens
tggaggaagaaaacaggtgaa

SEQ ID NO: 526 - DNA, 21 bp, homo sapiens
tggaggaagaaaacaggtgaa

SEQ ID NO: 527 - DNA, 21 bp, homo sapiens
acacagtaggtgctcattggc

SEQ ID NO: 528 - DNA, 21 bp, homo sapiens
tggatgaggtttttgcatagc

SEQ ID NO: 529 - DNA, 21 bp, homo sapiens
tggatgaggtttttgcatagc

SEQ ID NO: 530 - DNA, 21 bp, homo sapiens
ttaccgcaagagagatgctgt

SEQ ID NO: 531 - DNA, 21 bp, homo sapiens
tggcaggaaaaatatggaatc

SEQ ID NO: 532 - DNA, 21 bp, homo sapiens
gtagctgccaaaccttgactg

SEQ ID NO: 533 - DNA, 21 bp, homo sapiens
gagagcttcagcttctcctcc

SEQ ID NO: 534 - DNA, 21 bp, homo sapiens
gagagcttcagcttctcctcc

SEQ ID NO: 535 - DNA, 21 bp, homo sapiens
gagagcttcagcttctcctcc

SEQ ID NO: 536 - DNA, 21 bp, homo sapiens
agggtcacctcttcatctgct

SEQ ID NO: 537 - DNA, 21 bp, homo sapiens
tctgcagtccatccctgatac

SEQ ID NO: 538 - DNA, 21 bp, homo sapiens
accccaaaatgatgggactac

SEQ ID NO: 539 - DNA, 21 bp, homo sapiens
cctgggagtaaccctaagctg

SEQ ID NO: 540 - DNA, 21 bp, homo sapiens
atctgttgggagctgggtagt

SEQ ID NO: 541 - DNA, 21 bp, homo sapiens
gtccaacaaatgacctggaga

SEQ ID NO: 542 - DNA, 21 bp, homo sapiens
gagctgaggctggagaggtag

SEQ ID NO: 543 - DNA, 21 bp, homo sapiens
cctcaccacacaggtgtcttt

SEQ ID NO: 544 - DNA, 21 bp, homo sapiens
cctcaccacacaggtgtcttt

SEQ ID NO: 545 - DNA, 21 bp, homo sapiens
cctcaccacacaggtgtcttt

SEQ ID NO: 546 - DNA, 21 bp, homo sapiens
cctcaccacacaggtgtcttt

SEQ ID NO: 547 - DNA, 21 bp, homo sapiens
gtgcaccacatctggaaagat

SEQ ID NO: 548 - DNA, 21 bp, homo sapiens
gtgcaccacatctggaaagat

SEQ ID NO: 549 - DNA, 24 bp, bacteriophage m13
agcggataacaatttcacacagga

SEQ ID NO: 550 - DNA, 21 bp, homo sapiens
agctcttcaggaccaaggtct

SEQ ID NO: 551 - DNA, 24 bp, bacteriophage m13
cgccagggttttcccagtcacgac

SEQ ID NO: 552 - DNA, 20 bp, homo sapiens
ggcccacaaagacataaatt

SEQ ID NO: 553 - protein, 8 aa, Bacteriophage T7
DYKDDDDK

SEQ ID NO: 554 - DNA, 733 bp, homo sapiens
gggatccggagcccaaatcttctgacaaaactcacacatgcccaccgtgcccagcacctgaattcgagggtgcaccgtcagtcttcctcttccccccaaaacccaaggacaccctcatgatctcccggactcctgaggtcacatgcgtggtggtggacgtaagccacgaagaccctgaggtcaagttcaactggtacgtggacggcgtggaggtgcataatgccaagacaaagccgcgggaggagcagtacaacagcacgtaccgtgtggtcagcgtcctcaccgtcctgcaccaggactggctgaatggcaaggagtacaagtgcaaggtctccaacaaagccctcccaacccccatcgagaaaaccatctccaaagccaaagggcagccccgagaaccacaggtgtacaccctgcccccatcccgggatgagctgaccaagaaccaggtcagcctgacctgcctggtcaaaggcttctatccaagcgacatcgccgtggagtgggagagcaatgggcagccggagaacaactacaagaccacgcctcccgtgctggactccgacggctccttcttcctctacagcaagctcaccgtggacaagagcaggtggcagcaggggaacgtcttctcatgctccgtgatgcatgaggctctgcacaaccactacacgcagaagagcctctccctgtctccgggtaaatgagtgcgacggccgcgactctagaggat

SEQ ID NO: 555 - DNA, 1082 bp, Homo sapiens
  misc_feature (348)..(348): wherein N is either a "C" or a "T".
ctgtgcatggcatcatcctggccccctctagagctccaatcctccaaccagagccagctcttccctcaaaatgctacggcctgtgacaatgctccagaagcctgggacctgctgcacagagtgctgccgacatttatcatctccatctgtttcttcggcctcctagggaacctttttgtcctgttggtcttcctcctgccccggcggcaactgaacgtggcagaaatctacctggccaacctggcagcctctgatctggtgtttgtcttgggcttgcccttctgggcagagaatatctggaaccagtttaactggcctttcggagccctcctctgccgtgtcatcaatggggtcatcaaggccaatttgttcatcagcatcttcctggtggtggccatcagccaggaccgctaccgcgtgctggtgcaccctatggccagcggaaggcagcagcggcggaggcaggcccgggtcacctgcgtgctcatctgggttgtggggggcctcttgagcatccccacattcctgctgcgatccatccaagccgtcccagatctgaacatcaccgcctgcatcctgctcctcccccatgaggcctggcactttgcaaggattgtggagttaaatattctgggtttcctcctaccactggctgcgatcgtcttcttcaactaccacatcctggcctccctgcgaacgcgggaggaggtcagcaggacaagagtgcgggggccgaaggatagcaagaccacagcgctgatcctcacgctcgtggttgccttcctggtctgctgggccccttaccacttctttgccttcctggaattcttattccaggtgcaagcagtccgaggctgcttttgggaggacttcattgacctgggcctgcaattggccaacttctttgccttcactaacagctccctgaatccagtaatttatgtctttgtgggccggctcttcaggaccaaggtctgggaactttataaacaatgcacccctaaaagtcttgctccaatatcttcatcccataggaaagaaatcttccaacttttctggcggaattaaaacagcattgaacc

SEQ ID NO: 556 - protein, 353 aa, Homo sapiens; identical to SEQ ID NO: 6

SEQ ID NO: 557 - DNA, 1082 bp, Homo sapiens
  misc_feature (462)..(462): wherein N is either a "G" or an "A".
ctgtgcatggcatcatcctggccccctctagagctccaatcctccaaccagagccagctcttccctcaaaatgctacggcctgtgacaatgctccagaagcctgggacctgctgcacagagtgctgccgacatttatcatctccatctgtttcttcggcctcctagggaacctttttgtcctgttggtcttcctcctgccccggcggcaactgaacgtggcagaaatctacctggccaacctggcagcctctgatctggtgtttgtcttgggcttgcccttctgggcagagaatatctggaaccagtttaactggcctttcggagccctcctctgccgtgtcatcaacggggtcatcaaggccaatttgttcatcagcatcttcctggtggtggccatcagccaggaccgctaccgcgtgctggtgcaccctatggccagcggaaggcagcagcggcggagacaggcccgggtcacctgcgtgctcatctgggttgtggggggcctcttgagcatccccacattcctgctgcgatccatccaagccgtcccagatctgaacatcaccgcctgcatcctgctcctcccccatgaggcctggcactttgcaaggattgtggagttaaatattctgggtttcctcctaccactggctgcgatcgtcttcttcaactaccacatcctggcctccctgcgaacgcgggaggaggtcagcaggacaagagtgcgggggccgaaggatagcaagaccacagcgctgatcctcacgctcgtggttgccttcctggtctgctgggccccttaccacttctttgccttcctggaattcttattccaggtgcaagcagtccgaggctgcttttgggaggacttcattgacctgggcctgcaattggccaacttctttgccttcactaacagctccctgaatccagtaatttatgtctttgtgggccggctcttcaggaccaaggtctgggaactttataaacaatgcacccctaaaagtcttgctccaatatcttcatcccataggaaagaaatcttccaacttttctggcggaattaaaacagcattgaacc

SEQ ID NO: 558 - protein, 353 aa, Homo sapiens; identical to SEQ ID NO: 6

SEQ ID NO: 559 - DNA, 1082 bp, Homo sapiens
  misc_feature (577)..(577): wherein N is either a "C" or a "G".
ctgtgcatggcatcatcctggccccctctagagctccaatcctccaaccagagccagctcttccctcaaaatgctacggcctgtgacaatgctccagaagcctgggacctgctgcacagagtgctgccgacatttatcatctccatctgtttcttcggcctcctagggaacctttttgtcctgttggtcttcctcctgccccggcggcaactgaacgtggcagaaatctacctggccaacctggcagcctctgatctggtgtttgtcttgggcttgcccttctgggcagagaatatctggaaccagtttaactggcctttcggagccctcctctgccgtgtcatcaacggggtcatcaaggccaatttgttcatcagcatcttcctggtggtggccatcagccaggaccgctaccgcgtgctggtgcaccctatggccagcggaaggcagcagcggcggaggcaggcccgggtcacctgcgtgctcatctgggttgtggggggcctcttgagcatccccacattcctgctgcgatccatccaagccgtcccagatctgaacatcaccgcctgcatcgtgctcctcccccatgaggcctggcactttgcaaggattgtggagttaaatattctgggtttcctcctaccactggctgcgatcgtcttcttcaactaccacatcctggcctccctgcgaacgcgggaggaggtcagcaggacaagagtgcgggggccgaaggatagcaagaccacagcgctgatcctcacgctcgtggttgccttcctggtctgctgggccccttaccacttctttgccttcctggaattcttattccaggtgcaagcagtccgaggctgcttttgggaggacttcattgacctgggcctgcaattggccaacttctttgccttcactaacagctccctgaatccagtaatttatgtctttgtgggccggctcttcaggaccaaggtctgggaactttataaacaatgcacccctaaaagtcttgctccaatatcttcatcccataggaaagaaatcttccaacttttctggcggaattaaaacagcattgaacc

SEQ ID NO: 560 - protein, 353 aa, Homo sapiens
  VARIANT (191)..(191): wherein Xaa is either "Leu" or "Val".
MASSWPPLELQSSNQSQLFPQNATACDNAPEAWDLLHRVLPTFIISICFFGLLGNLFVLLVFLLPRRQLNVAEIYLANLAASDLVFVLGLPFWAENIWNQFNWPFGALLCRVINGVIKANLFISIFLVVAISQDRYRVLVHPMASGRQQRRRQARVTCVLIWVVGGLLSIPTFLLRSIQAVPDLNITACIVLLPHEAWHFARIVELNILGFLLPLAAIVFFNYHILASLRTREEVSRTRVRGPKDSKTTALILTLVVAFLVCWAPYHFFAFLEFLFQVQAVRGCFWEDFIDLGLQLANFFAFTNSSLNPVIYVFVGRLFRTKVWELYKQCTPKSLAPISSSHRKEIFQLFWRN

SEQ ID NO: 561 - DNA, 1082 bp, Homo sapiens; identical to SEQ ID NO: 5
  misc_feature (705)..(705): wherein N is either a "G" or an "A".

SEQ ID NO: 562 - protein, 353 aa, Homo sapiens
MASSWPPLELQSSNQSQLFPQNATACDNAPEAWDLLHRVLPTFIISICFFGLLGNLFVLLVFLLPRRQLNVAEIYLANLAASDLVFVLGLPFWAENIWNQFNWPFGALLCRVINGVIKANLFISIFLVVAISQDRYRVLVHPMASGRQQRRRQARVTCVLIWVVGGLLSIPTFLLRSIQAVPDLNITACILLLPHEAWHFARIVELNILGFLLPLAAIVFFNYHILASLRTRKEVSRTRVRGPKDSKTTALILTLVVAFLVCWAPYHFFAFLEFLFQVQAVRGCFWEDFIDLGLQLANFFAFTNSSLNPVIYVFVGRLFRTKVWELYKQCTPKSLAPISSSHRKEIFQLFWRN

SEQ ID NO: 563 - DNA, 3733 bp, Homo sapiens
  misc_feature (40)..(40): wherein N is either a "C" or a "T".
atgttctctccctggaagatatcaatgtttctgtctgtttgtgaggactccgtgcccaccacggcctctttcagcgccgacatgctcaatgtcaccttgcaagggcccactcttaacgggacctttgcccagagcaaatgcccccaagtggagtggctgggctggctcaacaccatccagccccccttcctctgggtgctgttcgtgctggccaccctagagaacatctttgtcctcagcgtcttctgcctgcacaagagcagctgcacggtggcagagatctacctggggaacctggccgcagcagacctgatcctggcctgcgggctgcccttctgggccatcaccatctccaacaacttcgactggctctttggggagacgctctgccgcgtggtgaatgccattatctccatgaacctgtacagcagcatctgtttcctgatgctggtgagcatcgaccgctacctggccctggtgaaaaccatgtccatgggccggatgcgcggcgtgcgctgggccaagctctacagcttggtgatctgggggtgtacgctgctcctgagctcacccatgctggtgttccggaccatgaaggagtacagcgatgagggccacaacgtcaccgcttgtgtcatcagctacccatccctcatctgggaagtgttcaccaacatgctcctgaatgtcgtgggcttcctgctgcccctgagtgtcatcaccttctgcacgatgcagatcatgcaggtgctgcggaacaacgagatgcagaagttcaaggagatccagacggagaggagggccacggtgctagtcctggttgtgctgctgctattcatcatctgctggctgcccttccagatcagcaccttcctggatacgctgcatcgcctcggcatcctctccagctgccaggacgagcgcatcatcgatgtaatcacacagatcgcctccttcatggcctacagcaacagctgcctcaacccactggtgtacgtgatcgtgggcaagcgcttccgaaagaagtcttgggaggtgtaccagggagtgtgccagaaagggggctgcaggtcagaacccattcagatggagaactccatgggcacactgcggacctccatctccgtggaacgccagattcacaaactgcaggactgggcagggagcagacagtgagcaaacgccagcagggctgctgtgaatttgtgtaaggattgagggacagttgcttttcagcatgggcccaggaatgccaaggagacatctatgcacgaccttgggaaatgagttgatgtctccggtaaaacaccggagactaattcctgccctgcccaattttgcagggagcatggctgtgaggatggggtgaactcacgcacagccaaggactccaaaatcacaacagcattactgttcttatttgctgccacacctgagccagcctgctccttcccaggagtggaggaggcctggggggagggagaggagtgactgagcttccctcccgtgtgttctccgtccctgccccagcaagacaacttagatctccaggagaactgccatccagctttggtgcaatggctgagtgcacaagtgagttgttgccctgggtttctttaatctattcagctagaactttgaaggacaatttcttgcattaataaaggttaagccctgaggggtccctgataacaacctggagaccaggattttatggctcccctcactgatggacaaggaggtctgtgccaaagaagaatccaataagcacatattgagcacttgctgtatatgcagtattgagcactgtaggcaagacccaagaaagagaaggagccatctccatcttgaaggaactcaaagactcaagtgggaacgactgggcactgccaccaccagaaagctgttcgacgagacggtcgagcagggtgctgtgggtgatatggacagcagaagggggagaccaaggttccagctcaaccaataactattgcacaaccacctgtccctgcctcagttcccttttatgtaacatgaagtcgttgtgagggttaaaggcagtaacaggtataaagtacttagaaaagcaaagggtgctacgtacatgtgaggcatcattacgcagacgtaactgggatatgtttactataaggaaaagacactgaggtctagaaatagctccgtggagcagaatcagtattgggagccggtggcggtgtgaagcaccagtgtctggcacacagtaggtgctcattggctcccttccacctgtcattcccaccaccctgaggccccaaccgccacacacacaggagcatttggagagaaggccatgtcttcaaagtctgatttgtgatgaggcagaggaagatatttctaatcggtcttgcccagaggatcacagtgctgagaccccccaccaccagccggtacctgggaagggggagagtgcaggcctgctcagggactgttcctgtctcagcaaccaagggattgttcctgtcaatcaatggtttattggaaggtggcccagtatgagccctagaagagtgtgaaaaggaatggcaatggtgttcaccatcggcagtgccagggcagcactcattcacttgataaatgaatatttattagctggttggagagctagaacctggagagctagaacctggagaactagaacctggagggctagaacctggagaggctagaaccaagaagggctagaacctggaggggctagaacctagagaagctaaaacctgagctagaagctggaggactagaacctggagggctggaatctgaagggctagaacctggagggctggaatctggagagctagaacctggagggctagaacctggagggctagaacctagaagggctagaacctggagggctggaatctggagagctagaacctggagggctagaacctggagggctagaacctagaagggctagaacctggagggctagaacctggcaggttagaacctagaagggctagaacctggagagccagaacctggagggctagaacctggaagggctagaacctgtagagctagaacatggagagctagaacccggcaggctagaacctggcaagctagaacctggagggaatgaacctggagggctagaacctggagaatgagaaaaatttacatggcaaagagcccataaatcctgaccaatccaactctgaattttaaagcaaaagcgtgaaaaaaaagattccctccttacccccaacccactcttttttcccaccacccactctcctctgcctcagtaagtatctggaggaagaaaacaggtgaaagaagaagtaaaaaccatttagtattagtattagaatgaagtcaaactgtgccacacatggtgaatgaaaaaaaaaaaaaagaggctgtgttttgtcacacagggcagtcattcagcaccagagcacgtgatggtctgagactctcttaggagcagagctctgccgcaatggccatgtggggatccacacctggtctgaggggcaactgagtctgcgggagaagagcggccctatgcatggtgtagatgccctgataaagaacatctgtcctgtgaaagactcaatgagctgttatgttgtaaacaggaagcatttcacatccaaacgagaaaatcatgtaaacatgtgtcttttctgtagagcataataaatggatgaggtttttgcaaaaaaaaaaaaaaaaa

SEQ ID NO: 564 - protein, 391 aa, Homo sapiens
  VARIANT (14)..(14): wherein Xaa is either "Arg" or "Cys".
MFSPWKISMFLSVCEDSVPTTASFSADMLNVTLQGPTLNGTFAQSKCPQVEWLGWLNTIQPPFLWVLFVLATLENIFVLSVFCLHKSSCTVAEIYLGNLAAADLILACGLPFWAITISNNFDWLFGETLCRVVNAIISMNLYSSICFLMLVSIDRYLALVKTMSMGRMRGVRWAKLYSLVIWGCTLLLSSPMLVFRTMKEYSDEGHNVTACVISYPSLIWEVFTNMLLNVVGFLLPLSVITFCTMQIMQVLRNNEMQKFKEIQTERRATVLVLVVLLLFIICWLPFQISTFLDTLHRLGILSSCQDERIIDVITQIASFMAYSNSCLNPLVYVIVGKRFRKKSWEVYQGVCQKGGCRSEPIQMENSMGTLRTSISVERQIHKLQDWAGSRQ

SEQ ID NO: 565 - DNA, 3733 bp, Homo sapiens
  misc_feature (933)..(933): wherein N is either a "T" or a "C".
atgttctctccctggaagatatcaatgtttctgtctgttcgtgaggactccgtgcccaccacggcctctttcagcgccgacatgctcaatgtcaccttgcaagggcccactcttaacgggacctttgcccagagcaaatgcccccaagtggagtggctgggctggctcaacaccatccagccccccttcctctgggtgctgttcgtgctggccaccctagagaacatctttgtcctcagcgtcttctgcctgcacaagagcagctgcacggtggcagagatctacctggggaacctggccgcagcagacctgatcctggcctgcgggctgcccttctgggccatcaccatctccaacaacttcgactggctctttggggagacgctctgccgcgtggtgaatgccattatctccatgaacctgtacagcagcatctgtttcctgatgctggtgagcatcgaccgctacctggccctggtgaaaaccatgtccatgggccggatgcgcggcgtgcgctgggccaagctctacagcttggtgatctgggggtgtacgctgctcctgagctcacccatgctggtgttccggaccatgaaggagtacagcgatgagggccacaacgtcaccgcttgtgtcatcagctacccatccctcatctgggaagtgttcaccaacatgctcctgaatgtcgtgggcttcctgctgcccctgagtgtcatcaccttctgcacgatgcagatcatgcaggtgctgcggaacaacgagatgcagaagttcaaggagatccagacggagaggagggccacggtgctagtcctggttgtgctgctgctattcatcatctgctggctgcccttccagatcagcaccttcctggatacgctgcatcgcctcggcatcctctccagctgccaggacgagcgcatcatcgacgtaatcacacagatcgcctccttcatggcctacagcaacagctgcctcaacccactggtgtacgtgatcgtgggcaagcgcttccgaaagaagtcttgggaggtgtaccagggagtgtgccagaaagggggctgcaggtcagaacccattcagatggagaactccatgggcacactgcggacctccatctccgtggaacgccagattcacaaactgcaggactgggcagggagcagacagtgagcaaacgccagcagggctgctgtgaatttgtgtaaggattgagggacagttgcttttcagcatgggcccaggaatgccaaggagacatctatgcacgaccttgggaaatgagttgatgtctccggtaaaacaccggagactaattcctgccctgcccaattttgcagggagcatggctgtgaggatggggtgaactcacgcacagccaaggactccaaaatcacaacagcattactgttcttatttgctgccacacctgagccagcctgctccttcccaggagtggaggaggcctggggggagggagaggagtgactgagcttccctcccgtgtgttctccgtccctgccccagcaagacaacttagatctccaggagaactgccatccagctttggtgcaatggctgagtgcacaagtgagttgttgccctgggtttctttaatctattcagctagaactttgaaggacaatttcttgcattaataaaggttaagccctgaggggtccctgataacaacctggagaccaggattttatggctcccctcactgatggacaaggaggtctgtgccaaagaagaatccaataagcacatattgagcacttgctgtatatgcagtattgagcactgtaggcaagacccaagaaagagaaggagccatctccatcttgaaggaactcaaagactcaagtgggaacgactgggcactgccaccaccagaaagctgttcgacgagacggtcgagcagggtgctgtgggtgatatggacagcagaagggggagaccaaggttccagctcaaccaataactattgcacaaccacctgtccctgcctcagttcccttttatgtaacatgaagtcgttgtgagggttaaaggcagtaacaggtataaagtacttagaaaagcaaagggtgctacgtacatgtgaggcatcattacgcagacgtaactgggatatgtttactataaggaaaagacactgaggtctagaaatagctccgtggagcagaatcagtattgggagccggtggcggtgtgaagcaccagtgtctggcacacagtaggtgctcattggctcccttccacctgtcattcccaccaccctgaggccccaaccgccacacacacaggagcatttggagagaaggccatgtcttcaaagtctgatttgtgatgaggcagaggaagatatttctaatcggtcttgcccagaggatcacagtgctgagaccccccaccaccagccggtacctgggaagggggagagtgcaggcctgctcagggactgttcctgtctcagcaaccaagggattgttcctgtcaatcaatggtttattggaaggtggcccagtatgagccctagaagagtgtgaaaaggaatggcaatggtgttcaccatcggcagtgccagggcagcactcattcacttgataaatgaatatttattagctggttggagagctagaacctggagagctagaacctggagaactagaacctggagggctagaacctggagaggctagaaccaagaagggctagaacctggaggggctagaacctagagaagctaaaacctgagctagaagctggaggactagaacctggagggctggaatctgaagggctagaacctggagggctggaatctggagagctagaacctggagggctagaacctggagggctagaacctagaagggctagaacctggagggctggaatctggagagctagaacctggagggctagaacctggagggctagaacctagaagggctagaacctggagggctagaacctggcaggttagaacctagaagggctagaacctggagagccagaacctggagggctagaacctggaagggctagaacctgtagagctagaacatggagagctagaacccggcaggctagaacctggcaagctagaacctggagggaatgaacctggagggctagaacctggagaatgagaaaaatttacatggcaaagagcccataaatcctgaccaatccaactctgaattttaaagcaaaagcgtgaaaaaaaagattccctccttacccccaacccactcttttttcccaccacccactctcctctgcctcagtaagtatctggaggaagaaaacaggtgaaagaagaagtaaaaaccatttagtattagtattagaatgaagtcaaactgtgccacacatggtgaatgaaaaaaaaaaaaaagaggctgtgttttgtcacacagggcagtcattcagcaccagagcacgtgatggtctgagactctcttaggagcagagctctgccgcaatggccatgtggggatccacacctggtctgaggggcaactgagtctgcgggagaagagcggccctatgcatggtgtagatgccctgataaagaacatctgtcctgtgaaagactcaatgagctgttatgttgtaaacaggaagcatttcacatccaaacgagaaaatcatgtaaacatgtgtcttttctgtagagcataataaatggatgaggtttttgcaaaaaaaaaaaaaaaaa

SEQ ID NO: 566 - protein, 391 aa, Homo sapiens; identical to SEQ ID NO: 12

SEQ ID NO: 567 - DNA, 3733 bp, Homo sapiens
  misc_feature (1061)..(1061): wherein N is either a "G" or an "A".
atgttctctccctggaagatatcaatgtttctgtctgttcgtgaggactccgtgcccaccacggcctctttcagcgccgacatgctcaatgtcaccttgcaagggcccactcttaacgggacctttgcccagagcaaatgcccccaagtggagtggctgggctggctcaacaccatccagccccccttcctctgggtgctgttcgtgctggccaccctagagaacatctttgtcctcagcgtcttctgcctgcacaagagcagctgcacggtggcagagatctacctggggaacctggccgcagcagacctgatcctggcctgcgggctgcccttctgggccatcaccatctccaacaacttcgactggctctttggggagacgctctgccgcgtggtgaatgccattatctccatgaacctgtacagcagcatctgtttcctgatgctggtgagcatcgaccgctacctggccctggtgaaaaccatgtccatgggccggatgcgcggcgtgcgctgggccaagctctacagcttggtgatctgggggtgtacgctgctcctgagctcacccatgctggtgttccggaccatgaaggagtacagcgatgagggccacaacgtcaccgcttgtgtcatcagctacccatccctcatctgggaagtgttcaccaacatgctcctgaatgtcgtgggcttcctgctgcccctgagtgtcatcaccttctgcacgatgcagatcatgcaggtgctgcggaacaacgagatgcagaagttcaaggagatccagacggagaggagggccacggtgctagtcctggttgtgctgctgctattcatcatctgctggctgcccttccagatcagcaccttcctggatacgctgcatcgcctcggcatcctctccagctgccaggacgagcgcatcatcgatgtaatcacacagatcgcctccttcatggcctacagcaacagctgcctcaacccactggtgtacgtgatcgtgggcaagcgcttccgaaagaagtcttgggaggtgtaccagggagtgtgccagaaagagggctgcaggtcagaacccattcagatggagaactccatgggcacactgcggacctccatctccgtggaacgccagattcacaaactgcaggactgggcagggagcagacagtgagcaaacgccagcagggctgctgtgaatttgtgtaaggattgagggacagttgcttttcagcatgggcccaggaatgccaaggagacatctatgcacgaccttgggaaatgagttgatgtctccggtaaaacaccggagactaattcctgccctgcccaattttgcagggagcatggctgtgaggatggggtgaactcacgcacagccaaggactccaaaatcacaacagcattactgttcttatttgctgccacacctgagccagcctgctccttcccaggagtggaggaggcctggggggagggagaggagtgactgagcttccctcccgtgtgttctccgtccctgccccagcaagacaacttagatctccaggagaactgccatccagctttggtgcaatggctgagtgcacaagtgagttgttgccctgggtttctttaatctattcagctagaactttgaaggacaatttcttgcattaataaaggttaagccctgaggggtccctgataacaacctggagaccaggattttatggctcccctcactgatggacaaggaggtctgtgccaaagaagaatccaataagcacatattgagcacttgctgtatatgcagtattgagcactgtaggcaagacccaagaaagagaaggagccatctccatcttgaaggaactcaaagactcaagtgggaacgactgggcactgccaccaccagaaagctgttcgacgagacggtcgagcagggtgctgtgggtgatatggacagcagaagggggagaccaaggttccagctcaaccaataactattgcacaaccacctgtccctgcctcagttcccttttatgtaacatgaagtcgttgtgagggttaaaggcagtaacaggtataaagtacttagaaaagcaaagggtgctacgtacatgtgaggcatcattacgcagacgtaactgggatatgtttactataaggaaaagacactgaggtctagaaatagctccgtggagcagaatcagtattgggagccggtggcggtgtgaagcaccagtgtctggcacacagtaggtgctcattggctcccttccacctgtcattcccaccaccctgaggccccaaccgccacacacacaggagcatttggagagaaggccatgtcttcaaagtctgatttgtgatgaggcagaggaagatatttctaatcggtcttgcccagaggatcacagtgctgagaccccccaccaccagccggtacctgggaagggggagagtgcaggcctgctcagggactgttcctgtctcagcaaccaagggattgttcctgtcaatcaatggtttattggaaggtggcccagtatgagccctagaagagtgtgaaaaggaatggcaatggtgttcaccatcggcagtgccagggcagcactcattcacttgataaatgaatatttattagctggttggagagctagaacctggagagctagaacctggagaactagaacctggagggctagaacctggagaggctagaaccaagaagggctagaacctggaggggctagaacctagagaagctaaaacctgagctagaagctggaggactagaacctggagggctggaatctgaagggctagaacctggagggctggaatctggagagctagaacctggagggctagaacctggagggctagaacctagaagggctagaacctggagggctggaatctggagagctagaacctggagggctagaacctggagggctagaacctagaagggctagaacctggagggctagaacctggcaggttagaacctagaagggctagaacctggagagccagaacctggagggctagaacctggaagggctagaacctgtagagctagaacatggagagctagaacccggcaggctagaacctggcaagctagaacctggagggaatgaacctggagggctagaacctggagaatgagaaaaatttacatggcaaagagcccataaatcctgaccaatccaactctgaattttaaagcaaaagcgtgaaaaaaaagattccctccttacccccaacccactcttttttcccaccacccactctcctctgcctcagtaagtatctggaggaagaaaacaggtgaaagaagaagtaaaaaccatttagtattagtattagaatgaagtcaaactgtgccacacatggtgaatgaaaaaaaaaaaaaagaggctgtgttttgtcacacagggcagtcattcagcaccagagcacgtgatggtctgagactctcttaggagcagagctctgccgcaatggccatgtggggatccacacctggtctgaggggcaactgagtctgcgggagaagagcggccctatgcatggtgtagatgccctgataaagaacatctgtcctgtgaaagactcaatgagctgttatgttgtaaacaggaagcatttcacatccaaacgagaaaatcatgtaaacatgtgtcttttctgtagagcataataaatggatgaggtttttgcaaaaaaaaaaaaaaaaa

SEQ ID NO: 568 - protein, 391 aa, Homo sapiens
  VARIANT (354)..(354): wherein Xaa is either "Gly" or "Glu".
MFSPWKISMFLSVREDSVPTTASFSADMLNVTLQGPTLNGTFAQSKCPQVEWLGWLNTIQPPFLWVLFVLATLENIFVLSVFCLHKSSCTVAEIYLGNLAAADLILACGLPFWAITISNNFDWLFGETLCRVVNAIISMNLYSSICFLMLVSIDRYLALVKTMSMGRMRGVRWAKLYSLVIWGCTLLLSSPMLVFRTMKEYSDEGHNVTACVISYPSLIWEVFTNMLLNVVGFLLPLSVITFCTMQIMQVLRNNEMQKFKEIQTERRATVLVLVVLLLFIICWLPFQISTFLDTLHRLGILSSCQDERIIDVITQIASFMAYSNSCLNPLVYVIVGKRFRKKSWEVYQGVCQKEGCRSEPIQMENSMGTLRTSISVERQIHKLQDWAGSRQ

SEQ ID NO: 569 - DNA, 3405 bp, Homo sapiens
cgcccaacccaagttcaaaggctgataagagagaaaatctcatgaggaggttttagtctagggaaagtcattcagtggatgtgatcttggctcacaggggacgatgtcaagctcttcctggctccttctcagccttgttgctgtaactgctgctcagtccaccattgaggaacaggccaagacatttttggacaagtttaaccacgaagccgaagacctgttctatcaaagttcacttgcttcttggaattataacaccaatattactgaagagaatgtccaaaacatgaataatgctggggacaaatggtctgcctttttaaaggaacagtccacacttgcccaaatgtatccactacaagaaattcagaatctcacagtcaagcttcagctgcaggctcttcagcaaaatgggtcttcagtgctctcagaagacaagagcaaacggttgaacacaattctaaatacaatgagcaccatctacagtactggaaaagtttgtaacccagataatccacaagaatgcttattacttgaaccaggtttgaatgaaataatggcaaacagtttagactacaatgagaggctctgggcttgggaaagctggagatctgaggtcggcaagcagctgaggccattatatgaagagtatgtggtcttgaaaaatgagatggcaagagcaaatcattatgaggactatggggattattggagaggagactatgaagtaaatggggtagatggctatgactacagccgcggccagttgattgaagatgtggaacatacctttgaagagattaaaccattatatgaacatcttcatgcctatgtgagggcaaagttgatgaatgcctatccttcctatatcagtccaattggatgcctccctgctcatttgcttggtgatatgtggggtagattttggacaaatctgtactctttgacagttccctttggacagaaaccaaacatagatgttactgatgcaatggtggaccaggcctgggatgcacagagaatattcaaggaggccgagaagttctttgtatctgttggtcttcctaatatgactcaaggattctgggaaaattccatgctaacggacccaggaaatgttcagaaagcagtctgccatcccacagcttgggacctggggaagggcgacttcaggatccttatgtgcacaaaggtgacaatggacgacttcctgacagctcatcatgagatggggcatatccagtatgatatggcatatgctgcacaaccttttctgctaagaaatggagctaatgaaggattccatgaagctgttggggaaatcatgtcactttctgcagccacacctaagcatttaaaatccattggtcttctgtcacccgattttcaagaagacaatgaaacagaaataaacttcctgctcaaacaagcactcacgattgttgggactctgccatttacttacatgttagagaagtggaggtggatggtctttaaaggggaaattcccaaagaccagtggatgaaaaagtggtgggagatgaagcgagagatagttggggtggtggaacctgtgccccatgatgaaacatactgtgaccccgcatctctgttccatgtttctaatgattactcattcattcgatattacacaaggaccctttaccaattccagtttcaagaagcactttgtcaagcagctaaacatgaaggccctctgcacaaatgtgacatctcaaactctacagaagctggacagaaactgttcaatatgctgaggcttggaaaatcagaaccctggaccctagcattggaaaatgttgtaggagcaaagaacatgaatgtaaggccactgctcaactactttgagcccttatttacctggctgaaagaccagaacaagaattcttttgtgggatggagtaccgactggagtccatatgcagaccaaagcatcaaagtgaggataagcctaaaatcagctcttggagataaagcatatgaatggaacgacaatgaaatgtacctgttccgatcatctgttgcatatgctatgaggcagtactttttaaaagtaaaaaatcagatgattctttttggggaggaggatgtgcgagtggctaatttgaaaccaagaatctcctttaatttctttgtcactgcacctaaaaatgtgtctgatatcattcctagaactgaagttgaaaaggccatcaggatgtcccggagccgtatcaatgatgctttccgtctgaatgacaacagcctagagtttctggggatacagccaacacttggacctcctaaccagccccctgtttccatatggctgattgtttttggagttgtgatgggagtgatagtggttggcattgtcatcctgatcttcactgggatcagagatcggaagaagaaaaataaagcaagaagtggagaaaatccttatgcctccatcgatattagcaaaggagaaaataatccaggattccaaaacactgatgatgttcagacctccttttagaaaaatctatgtttttcctcttgaggtgattttgttgtatgtaaatgttaatttcatggtatagaaaatataagatgataaagatatcattaaatgtcaaaactatgactctgttcagaaaaaaaattgtccaaagacaacatggccaaggagagagcatcttcattgacattgctttcagtatttatttctgtctctggatttgacttctgttctgtttcttaataaggattttgtattagagtatattagggaaagtgtgtatttggtctcacaggctgttcagggataatctaaatgtaaatgtctgttgaatttctgaagttgaaaacaaggatatatcattggagcaagtgttggatcttgtatggaatatggatggatcacttgtaaggacagtgcctgggaactggtgtagctgcaaggattgagaatggcatgcattagctcactttcatttaatccattgtcaaggatgacatgctttcttcacagtaactcagttcaagtactatggtgatttgcctacagtgatgtttggaatcgatcatgctttcttcaaggtgacaggtctaaagagagaagaatccagggaacaggtagaggacattgctttttcacttccaaggtgcttgatcaacatctccctgacaacacaaaactagagccaggggcctccgtgaactcccagagcatgcctgatagaaactcatttctactgttctctaactgtggagtgaatggaaattccaactgtatgttcaccctctgaagtgggtacccagtctcttaaatcttttgtatttgctcacagtgtttgagcagtgctgagcacaaagcagacactcaataaatgctagatttacacactcaaaaaaaaaaaa

SEQ ID NO: 570 - protein, 805 aa, Homo sapiens [sequence omitted]

SEQ ID NO: 571 - DNA, 1284 bp, Homo sapiens
atgcatcttatcgactacctgctcctcctgctggttggactactggccctttctcatggccagctgcacgttgagcatgatggtgagagttgcagtaacagctcccaccagcagattctggagacaggtgagggctcccccagcctcaagatagcccctgccaatgctgactttgccttccgcttctactacctgatcgcttcggagaccccggggaagaacatctttttctccccgctgagcatctcggcggcctacgccatgctttccctgggggcctgctcacacagccgcagccagatccttgagggcctgggcttcaacctcaccgagctgtctgagtccgatgtccataggggcttccagcacctcctgcacactctcaacctccccggccatgggctggaaacacgcgtgggcagtgctctgttcctgagccacaacctgaagttccttgcaaaattcctgaatgacaccatggccgtctatgaggctaaactcttccacaccaacttctacgacactgtgggcacaatccagcttatcaacgaccacgtcaagaaggaaactcgagggaagattgtggatttggtcagtgagctcaagaaggacgtcttgatggtgctggtgaattacatttacttcaaagccctgtgggagaaaccattcatttcctcaaggaccactcccaaagacttctatgttgatgagaacacaacagtccgggtgcccatgatgctgcaggaccaggagcatcactggtatcttcatgacagatacttgccctgctcggtgctacggatggattacaaaggagacgcaaccgtgtttttcattctccctaaccaaggcaaaatgagggagattgaagaggttctgactccagagatgctaatgaggtggaacaacttgttgcggaagaggaatttttacaagaagctagagttgcatcttcccaagttctccatttctggctcctatgtattagatcagattttgcccaggctgggcttcacggatctgttctccaagtgggctgacttatccggcatcaccaaacagcaaaaactggaggcatccaaaagtttccacaaggccaccttggacgtggatgaggctggcaccgaggctgcagcagccaccacgttcgcgatcaaattcttctctgcccagaccaatcgccacatcctgcgattcaaccggcccttccttgtggtgatcttttccaccagcacccagagtgtcctctttctgggcaaggtcgtcgaccccacgaaaccatag

SEQ ID NO: 572 - protein, 427 aa, Homo sapiens
MHLIDYLLLLLVGLLALSHGQLHVEHDGESCSNSSHQQILETGEGSPSLKIAPANADFAFRFYYLIASETPGKNIFFSPLSISAAYAMLSLGACSHSRSQILEGLGFNLTELSESDVHRGFQHLLHTLNLPGHGLETRVGSALFLSHNLKFLAKFLNDTMAVYEAKLFHTNFYDTVGTIQLINDHVKKETRGKIVDLVSELKKDVLMVLVNYIYFKALWEKPFISSRTTPKDFYVDENTTVRVPMMLQDQEHHWYLHDRYLPCSVLRMDYKGDATVFFILPNQGKMREIEEVLTPEMLMRWNNLLRKRNFYKKLELHLPKFSISGSYVLDQILPRLGFTDLFSKWADLSGITKQQKLEASKSFHKATLDVDEAGTEAAAATTFAIKFFSAQTNRHILRFNRPFLVVIFSTSTQSVLFLGKVVDPTKP

SEQ ID NO: 573 - DNA, 1284 bp, Homo sapiens
  misc_feature (699)..(699): wherein N is either a "C" or a "T".
atgcatcttatcgactacctgctcctcctgctggttggactactggccctttctcatggccagctgcacgttgagcatgatggtgagagttgcagtaacagctcccaccagcagattctggagacaggtgagggctcccccagcctcaagatagcccctgccaatgctgactttgccttccgcttctactacctgatcgcttcggagaccccggggaagaacatctttttctccccgctgagcatctcggcggcctacgccatgctttccctgggggcctgctcacacagccgcagccagatccttgagggcctgggcttcaacctcaccgagctgtctgagtccgatgtccataggggcttccagcacctcctgcacactctcaacctccccggccatgggctggaaacacgcgtgggcagtgctctgttcctgagccacaacctgaagttccttgcaaaattcctgaatgacaccatggccgtctatgaggctaaactcttccacaccaacttctacgacactgtgggcacaatccagcttatcaacgaccacgtcaagaaggaaactcgagggaagattgtggatttggtcagtgagctcaagaaggacgtcttgatggtgctggtgaattacatttacttcaaagccctgtgggagaaaccattcatttcctcaaggaccactcccaaagacttttatgttgatgagaacacaacagtccgggtgcccatgatgctgcaggaccaggagcatcactggtatcttcatgacagatacttgccctgctcggtgctacggatggattacaaaggagacgcaaccgtgtttttcattctccctaaccaaggcaaaatgagggagattgaagaggttctgactccagagatgctaatgaggtggaacaacttgttgcggaagaggaatttttacaagaagctagagttgcatcttcccaagttctccatttctggctcctatgtattagatcagattttgcccaggctgggcttcacggatctgttctccaagtgggctgacttatccggcatcaccaaacagcaaaaactggaggcatccaaaagtttccacaaggccaccttggacgtggatgaggctggcaccgaggctgcagcagccaccacgttcgcgatcaaattcttctctgcccagaccaatcgccacatcctgcgattcaaccggcccttccttgtggtgatcttttccaccagcacccagagtgtcctctttctgggcaaggtcgtcgaccccacgaaaccatag

SEQ ID NO: 574 - protein, 427 aa, Homo sapiens; identical to SEQ ID NO: 572

SEQ ID NO: 575 - DNA, 1284 bp, Homo sapiens
  misc_feature (597)..(597): wherein N is either a "T" or a "C".
atgcatcttatcgactacctgctcctcctgctggttggactactggccctttctcatggccagctgcacgttgagcatgatggtgagagttgcagtaacagctcccaccagcagattctggagacaggtgagggctcccccagcctcaagatagcccctgccaatgctgactttgccttccgcttctactacctgatcgcttcggagaccccggggaagaacatctttttctccccgctgagcatctcggcggcctacgccatgctttccctgggggcctgctcacacagccgcagccagatccttgagggcctgggcttcaacctcaccgagctgtctgagtccgatgtccataggggcttccagcacctcctgcacactctcaacctccccggccatgggctggaaacacgcgtgggcagtgctctgttcctgagccacaacctgaagttccttgcaaaattcctgaatgacaccatggccgtctatgaggctaaactcttccacaccaacttctacgacactgtgggcacaatccagcttatcaacgaccacgtcaagaaggaaactcgagggaagattgtggatttggtcagcgagctcaagaaggacgtcttgatggtgctggtgaattacatttacttcaaagccctgtgggagaaaccattcatttcctcaaggaccactcccaaagacttctatgttgatgagaacacaacagtccgggtgcccatgatgctgcaggaccaggagcatcactggtatcttcatgacagatacttgccctgctcggtgctacggatggattacaaaggagacgcaaccgtgtttttcattctccctaaccaaggcaaaatgagggagattgaagaggttctgactccagagatgctaatgaggtggaacaacttgttgcggaagaggaatttttacaagaagctagagttgcatcttcccaagttctccatttctggctcctatgtattagatcagattttgcccaggctgggcttcacggatctgttctccaagtgggctgacttatccggcatcaccaaacagcaaaaactggaggcatccaaaagtttccacaaggccaccttggacgtggatgaggctggcaccgaggctgcagcagccaccacgttcgcgatcaaattcttctctgcccagaccaatcgccacatcctgcgattcaaccggcccttccttgtggtgatcttttccaccagcacccagagtgtcctctttctgggcaaggtcgtcgaccccacgaaaccatag

SEQ ID NO: 576 - protein, 427 aa, Homo sapiens; identical to SEQ ID NO: 572

SEQ ID NO: 577 - DNA, 1284 bp, Homo sapiens
  misc_feature (699)..(699): wherein N is either a "C" or a "T".
  misc_feature (1143)..(1143): wherein N is either a "C" or a "G".
  misc_feature (412)..(412): wherein N is either a "C" or a "T".
  misc_feature (597)..(597): wherein N is either a "T" or a "C".
atgcatcttatcgactacctgctcctcctgctggttggactactggccctttctcatggccagctgcacgttgagcatgatggtgagagttgcagtaacagctcccaccagcagattctggagacaggtgagggctcccccagcctcaagatagcccctgccaatgctgactttgccttccgcttctactacctgatcgcttcggagaccccggggaagaacatctttttctccccgctgagcatctcggcggcctacgccatgctttccctgggggcctgctcacacagccgcagccagatccttgagggcctgggcttcaacctcaccgagctgtctgagtccgatgtccataggggcttccagcacctcctgcacactctcaacctccccggccatgggctggaaacangcgtgggcagtgctctgttcctgagccacaacctgaagttccttgcaaaattcctgaatgacaccatggccgtctatgaggctaaactcttccacaccaacttctacgacactgtgggcacaatccagcttatcaacgaccacgtcaagaaggaaactcgagggaagattgtggatttggtcagngagctcaagaaggacgtcttgatggtgctggtgaattacatttacttcaaagccctgtgggagaaaccattcatttcctcaaggaccactcccaaagacttntatgttgatgagaacacaacagtccgggtgcccatgatgctgcaggaccaggagcatcactggtatcttcatgacagatacttgccctgctcggtgctacggatggattacaaaggagacgcaaccgtgtttttcattctccctaaccaaggcaaaatgagggagattgaagaggttctgactccagagatgctaatgaggtggaacaacttgttgcggaagaggaatttttacaagaagctagagttgcatcttcccaagttctccatttctggctcctatgtattagatcagattttgcccaggctgggcttcacggatctgttctccaagtgggctgacttatccggcatcaccaaacagcaaaaactggaggcatccaaaagtttccacaaggccaccttggacgtggatgaggctggcaccgaggctgcagcagccacnacgttcgcgatcaaattcttctctgcccagaccaatcgccacatcctgcgattcaaccggcccttccttgtggtgatcttttccaccagcacccagagtgtcctctttctgggcaaggtcgtcgaccccacgaaaccatag

SEQ ID NO: 578 - protein, 427 aa, Homo sapiens
  VARIANT (138)..(138): wherein Xaa is either "Arg" or a "Cys".
MHLIDYLLLLLVGLLALSHGQLHVEHDGESCSNSSHQQILETGEGSPSLKIAPANADFAFRFYYLIASETPGKNIFFSPLSISAAYAMLSLGACSHSRSQILEGLGFNLTELSESDVHRGFQHLLHTLNLPGHGLETXVGSALFLSHNLKFLAKFLNDTMAVYEAKLFHTNFYDTVGTIQLINDHVKKETRGKIVDLVSELKKDVLMVLVNYIYFKALWEKPFISSRTTPKDFYVDENTTVRVPMMLQDQEHHWYLHDRYLPCSVLRMDYKGDATVFFILPNQGKMREIEEVLTPEMLMRWNNLLRKRNFYKKLELHLPKFSISGSYVLDQILPRLGFTDLFSKWADLSGITKQQKLEASKSFHKATLDVDEAGTEAAAATTFAIKFFSAQTNRHILRFNRPFLVVIFSTSTQSVLFLGKVVDPTKP

SEQ ID NO: 579 - DNA, 18 bp, Homo sapiens
tgtcatcaatggggtcat

SEQ ID NO: 580 - DNA, 18 bp, Homo sapiens
cggcggaggcaggcccgg

SEQ ID NO: 581 - DNA, 18 bp, Homo sapiens
gcctgcatcctgctcctc

SEQ ID NO: 582 - DNA, 18 bp, Homo sapiens
acgcgggaggaggtcaga

SEQ ID NO: 583 - DNA, 18 bp, Homo sapiens
tggagaatgcgtgtattt

SEQ ID NO: 584 - DNA, 18 bp, Homo sapiens
tgtctgttcgtgaggact

SEQ ID NO: 585 - DNA, 19 bp, Homo sapiens
ccttccttccgaagagaac

SEQ ID NO: 586 - DNA, 19 bp, Homo sapiens
aaacacccgcacccaggaa

SEQ ID NO: 587 - DNA, 19 bp, Homo sapiens
gtacgtggcgtacaaagaa

SEQ ID NO: 588 - DNA, 19 bp, Homo sapiens
atgacatcattacccagcc

SEQ ID NO: 589 - DNA, 19 bp, Homo sapiens
catcatcgatgtaatcaca

SEQ ID NO: 590 - DNA, 19 bp, Homo sapiens
gccagaaagggggctgcag

SEQ ID NO: 591 - DNA, 19 bp, Homo sapiens
caggagaactgccatccag

SEQ ID NO: 592 - DNA, 19 bp, Homo sapiens
aagtgggaacgactgggca

SEQ ID NO: 593 - DNA, 19 bp, Homo sapiens
tgaggcatcattacgcaga

SEQ ID NO: 594 - DNA, 19 bp, Homo sapiens
aggtgctcattggctccct

SEQ ID NO: 595 - DNA, 18 bp, Homo sapiens
tgaaagaaccacatggcc

SEQ ID NO: 596 - DNA, 19 bp, Homo sapiens
atcatagatataaatatat

SEQ ID NO: 597 - DNA, 19 bp, Homo sapiens
agttgacaactttcacacc

SEQ ID NO: 598 - DNA, 18 bp, Homo sapiens
attagtagcctacctggt

SEQ ID NO: 599 - DNA, 19 bp, Homo sapiens
gaatgctaatataaagata

SEQ ID NO: 600 - DNA, 19 bp, Homo sapiens
agaataatgcttggcacac

SEQ ID NO: 601 - DNA, 19 bp, Homo sapiens
atcagacacatttttaggt

SEQ ID NO: 602 - DNA, 19 bp, Homo sapiens
gcctgcagatgtcctgtac

SEQ ID NO: 603 - DNA, 19 bp, Homo sapiens
caaagacttctatgttgat

SEQ ID NO: 604 - DNA, 15 bp, Homo sapiens
gagttagaacattag

SEQ ID NO: 605 - DNA, 17 bp, Homo sapiens
cccacaaactgcttcgg

SEQ ID NO: 606 - DNA, 21 bp, Homo sapiens
cttgagctcactgaccaaatc

SEQ ID NO: 607 - DNA, 19 bp, Homo sapiens
gaggatggctatcctcaga

SEQ ID NO: 608 - DNA, 18 bp, Homo sapiens
tccacaacatctgtggag

SEQ ID NO: 609 - DNA, 18 bp, Homo sapiens
ccaaagttgtggggatag

SEQ ID NO: 610 - DNA, 19 bp, Homo sapiens
tgtttgtttggttgtttgt

SEQ ID NO: 611 - DNA, 18 bp, Homo sapiens
tgtcatcaacggggtcat

SEQ ID NO: 612 - DNA, 18 bp, Homo sapiens
cggcggagacaggcccgg

SEQ ID NO: 613 - DNA, 18 bp, Homo sapiens
gcctgcatcgtgctcctc

SEQ ID NO: 614 - DNA, 18 bp, Homo sapiens
acgcgggaagaggtcaga

SEQ ID NO: 615 - DNA, 18 bp, Homo sapiens
tggagaatgagtgtattt

SEQ ID NO: 616 - DNA, 18 bp, Homo sapiens
tgtctgtttgtgaggact

SEQ ID NO: 617 - DNA, 19 bp, Homo sapiens
ccttccttcagaagagaac

SEQ ID NO: 618 - DNA, 19 bp, Homo sapiens
aaacacccgtacccaggaa

SEQ ID NO: 619 - DNA, 19 bp, Homo sapiens
gtacgtggcatacaaagaa

SEQ ID NO: 620 - DNA, 19 bp, Homo sapiens
atgacatcactacccagcc

SEQ ID NO: 621 - DNA, 19 bp, Homo sapiens
catcatcgacgtaatcaca

SEQ ID NO: 622 - DNA, 19 bp, Homo sapiens
gccagaaagagggctgcag

SEQ ID NO: 623 - DNA, 19 bp, Homo sapiens
caggagaaccgccatccag

SEQ ID NO: 624 - DNA, 19 bp, Homo sapiens
aagtgggaatgactgggca

SEQ ID NO: 625 - DNA, 19 bp, Homo sapiens
tgaggcatctttacgcaga

SEQ ID NO: 626 - DNA, 19 bp, Homo sapiens
aggtgctcactggctccct

SEQ ID NO: 627 - DNA, 18 bp, Homo sapiens
tgaaagaaacacatggcc

SEQ ID NO: 628 - DNA, 19 bp, Homo sapiens
atcatagatgtaaatatat

SEQ ID NO: 629 - DNA, 19 bp, Homo sapiens
agttgacaagtttcacacc

SEQ ID NO: 630 - DNA, 18 bp, Homo sapiens
attagtagcttacctggt

SEQ ID NO: 631 - DNA, 19 bp, Homo sapiens
gaatgctaacataaagata

SEQ ID NO: 632 - DNA, 19 bp, Homo sapiens
agaataatgtttggcacac

SEQ ID NO: 633 - DNA, 19 bp, Homo sapiens
atcagacacgtttttaggt

SEQ ID NO: 634 - DNA, 19 bp, Homo sapiens
gcctgcagaggtcctgtac

SEQ ID NO: 635 - DNA, 19 bp, Homo sapiens
caaagacttttatgttgat

SEQ ID NO: 636 - DNA, 15 bp, Homo sapiens
gagttagagcattag

SEQ ID NO: 637 - DNA, 17 bp, Homo sapiens
cccacaaacagcttcgg

SEQ ID NO: 638 - DNA, 21 bp, Homo sapiens
cttgagctcgctgaccaaatc

SEQ ID NO: 639 - DNA, 19 bp, Homo sapiens
gaggatggcaatcctcaga

SEQ ID NO: 640 - DNA, 18 bp, Homo sapiens
tccacaacctctgtggag

SEQ ID NO: 641 - DNA, 18 bp, Homo sapiens
ccaaagttgcggggatag

SEQ ID NO: 642 - DNA, 19 bp, Homo sapiens
tgtttgtttcgttgtttgt

SEQ ID NO: 643 - DNA, 41 bp, Homo sapiens
ctcctctgccgtgtcatcaacggggtcatcaaggccaattt

SEQ ID NO: 644 - DNA, 41 bp, Homo sapiens
ggaaggcagcagcggcggaggcaggcccgggtcacctgcgt

SEQ ID NO: 645 - DNA, 41 bp, Homo sapiens
tgaacatcaccgcctgcatcctgctcctcccccatgaggcc

SEQ ID NO: 646 - DNA, 41 bp, Homo sapiens
gcctccctgcgaacgcgggaggaggtcagcaggacaagagt

SEQ ID NO: 647 - DNA, 41 bp, Homo sapiens
ctggggattgcaaaatacacgcattctccagcagggaggag

SEQ ID NO: 648 - DNA, 41 bp, Homo sapiens
ggtgggcacggagtcctcacgaacagacagaaacattgata

SEQ ID NO: 649 - DNA, 41 bp, Homo sapiens
agccttaaaacccttccttcagaagagaacagataagagtg

SEQ ID NO: 650 - DNA, 41 bp, Homo sapiens
agctgtcctgtttcctgggtacgggtgtttgcgctcccctg

SEQ ID NO: 651 - DNA, 41 bp, Homo sapiens
agtcctgggatttctttgtatgccacgtacggctcccaagg

SEQ ID NO: 652 - DNA, 41 bp, Homo sapiens
catctttcaagggatgggtagtgatgtcatcagcctcctgg

SEQ ID NO: 653 - DNA, 41 bp, Homo sapiens
gaggcgatctgtgtgattacatcgatgatgcgctcgtcctg

SEQ ID NO: 654 - DNA, 41 bp, Homo sapiens
tgggttctgacctgcagccccctttctggcacactccctgg

SEQ ID NO: 655 - DNA, 41 bp, Homo sapiens
ttgcaccaaagctggatggcagttctcctggagatctaagt

SEQ ID NO: 656 - DNA, 41 bp, Homo sapiens
ggtggtggcagtgcccagtcgttcccacttgagtctttgag

SEQ ID NO: 657 - DNA, 41 bp, Homo sapiens; identical to SEQ ID NO: 199

SEQ ID NO: 658 - DNA, 41 bp, Homo sapiens; identical to SEQ ID NO: 200

SEQ ID NO: 659 - DNA, 41 bp, Homo sapiens
acttatagttttgaaaagaaccacatggcctctcttctttc

SEQ ID NO: 660 - DNA, 41 bp, Homo sapiens
tccagatgtacatatatttacatctatgatctatggtttct

SEQ ID NO: 661 - DNA, 41 bp, Homo sapiens
gacaaggaatgggtgtgaaacttgtcaactgggtgtactca

SEQ ID NO: 662 - DNA, 41 bp, Homo sapiens
cactactaaaaattagtagcctacctggttcaagtaataag

SEQ ID NO: 663 - DNA, 41 bp, Homo sapiens
tttgctgaagagaatgctaatataaagatatccttttgacc

SEQ ID NO: 664 - DNA, 41 bp, Homo sapiens
gtaaatgactcagaataatgcttggcacacaggaagaacac

SEQ ID NO: 665 - DNA, 41 bp, Homo sapiens
ctaggaatgatatcagacacatttttaggtgcagtgacaaa

SEQ ID NO: 666 - DNA, 41 bp, Homo sapiens
ctagctctgtggcctgcagatgtcctgtaccttcttttcat

SEQ ID NO: 667 - DNA, 41 bp, Homo sapiens
aggaccactcccaaagacttctatgttgatgagaacacaac

SEQ ID NO: 668 - DNA, 41 bp, Homo sapiens
gcttgttcattaatctaatgttctaactcaatgcccctttc

SEQ ID NO: 669 - DNA, 41 bp, Homo sapiens
gaggtggtctgagccgaagctgtttgtggggacagaactca

SEQ ID NO: 670 - DNA, 41 bp, Homo sapiens
aagattgtggatttggtcagtgagctcaagaaggacgtctt

SEQ ID NO: 671 - DNA, 41 bp, Homo sapiens
ctaaaataaactctgaggatagccatcctccatgcaaaatc

SEQ ID NO: 672 - DNA, 41 bp, Homo sapiens
catataaagcactccacagatgtttgtggaacagaccctaa

SEQ ID NO: 673 - DNA, 41 bp, Homo sapiens
cgggtaccaattctatccccacaactttgggcaggtcactt

SEQ ID NO: 674 - DNA, 41 bp, Homo sapiens
caaacaaacaaacaaacaaccaaacaaacaaaaaaaaccca

SEQ ID NO: 675 - DNA, 41 bp, Homo sapiens
ctcctctgccgtgtcatcaatggggtcatcaaggccaattt

SEQ ID NO: 676 - DNA, 41 bp, Homo sapiens
ggaaggcagcagcggcggagacaggcccgggtcacctgcgt

SEQ ID NO: 677 - DNA, 41 bp, Homo sapiens
tgaacatcaccgcctgcatcgtgctcctcccccatgaggcc

SEQ ID NO: 678 - DNA, 41 bp, Homo sapiens
gcctccctgcgaacgcgggaagaggtcagcaggacaagagt

SEQ ID NO: 679 - DNA, 41 bp, Homo sapiens
ctggggattgcaaaatacactcattctccagcagggaggag

SEQ ID NO: 680 - DNA, 41 bp, Homo sapiens
ggtgggcacggagtcctcacaaacagacagaaacattgata

SEQ ID NO: 681 - DNA, 41 bp, Homo sapiens
agccttaaaacccttccttccgaagagaacagataagagtg

SEQ ID NO: 682 - DNA, 41 bp, Homo sapiens
agctgtcctgtttcctgggtgcgggtgtttgcgctcccctg

SEQ ID NO: 683 - DNA, 41 bp, Homo sapiens
agtcctgggatttctttgtacgccacgtacggctcccaagg

SEQ ID NO: 684 - DNA, 41 bp, Homo sapiens
catctttcaagggatgggtaatgatgtcatcagcctcctgg

SEQ ID NO: 685 - DNA, 41 bp, Homo sapiens
gaggcgatctgtgtgattacgtcgatgatgcgctcgtcctg

SEQ ID NO: 686 - DNA, 41 bp, Homo sapiens
tgggttctgacctgcagccctctttctggcacactccctgg

SEQ ID NO: 687 - DNA, 41 bp, Homo sapiens
ttgcaccaaagctggatggcggttctcctggagatctaagt

SEQ ID NO: 688 - DNA, 41 bp, Homo sapiens
ggtggtggcagtgcccagtcattcccacttgagtctttgag

SEQ ID NO: 689 - DNA, 41 bp, Homo sapiens; identical to SEQ ID NO: 262

SEQ ID NO: 690 - DNA, 41 bp, Homo sapiens; identical to SEQ ID NO: 263

SEQ ID NO: 691 - DNA, 41 bp, Homo sapiens
acttatagttttgaaaagaaacacatggcctctcttctttc

SEQ ID NO: 692 - DNA, 41 bp, Homo sapiens
tccagatgtacatatatttatatctatgatctatggtttct

SEQ ID NO: 693 - DNA, 41 bp, Homo sapiens
gacaaggaatgggtgtgaaagttgtcaactgggtgtactca

SEQ ID NO: 694 - DNA, 41 bp, Homo sapiens
cactactaaaaattagtagcttacctggttcaagtaataag

SEQ ID NO: 695 - DNA, 41 bp, Homo sapiens
tttgctgaagagaatgctaacataaagatatccttttgacc

SEQ ID NO: 696 - DNA, 41 bp, Homo sapiens
gtaaatgactcagaataatgtttggcacacaggaagaacac

SEQ ID NO: 697 - DNA, 41 bp, Homo sapiens
ctaggaatgatatcagacacgtttttaggtgcagtgacaaa

SEQ ID NO: 698 - DNA, 41 bp, Homo sapiens
ctagctctgtggcctgcagaggtcctgtaccttcttttcat

SEQ ID NO: 699 - DNA, 41 bp, Homo sapiens
aggaccactcccaaagacttttatgttgatgagaacacaac

SEQ ID NO: 700 - DNA, 41 bp, Homo sapiens
gcttgttcattaatctaatgctctaactcaatgcccctttc

SEQ ID NO: 701 - DNA, 41 bp, Homo sapiens
gaggtggtctgagccgaagcagtttgtggggacagaactca

SEQ ID NO: 702 - DNA, 41 bp, Homo sapiens
aagattgtggatttggtcagcgagctcaagaaggacgtctt

SEQ ID NO: 703 - DNA, 41 bp, Homo sapiens
ctaaaataaactctgaggattgccatcctccatgcaaaatc

SEQ ID NO: 704 - DNA, 41 bp, Homo sapiens
catataaagcactccacagaggtttgtggaacagaccctaa

SEQ ID NO: 705 - DNA, 41 bp, Homo sapiens
cgggtaccaattctatccccgcaactttgggcaggtcactt

SEQ ID NO: 706 - DNA, 41 bp, Homo sapiens
caaacaaacaaacaaacaacgaaacaaacaaaaaaaaccca

SEQ ID NO: 707 - DNA, 21 bp, Homo sapiens
gcctctgatctggtgtttgtc

SEQ ID NO: 708 - DNA, 21 bp, Homo sapiens
gcctctgatctggtgtttgtc

SEQ ID NO: 709 - DNA, 21 bp, Homo sapiens
gcctctgatctggtgtttgtc

SEQ ID NO: 710 - DNA, 21 bp, Homo sapiens
cactttgcaaggattgtggag

SEQ ID NO: 711 - DNA, 20 bp, Homo sapiens
ggcagggcaggaattagtct

SEQ ID NO: 712 - DNA, 20 bp, Homo sapiens
ggcagggcaggaattagtct

SEQ ID NO: 713 - DNA, 21 bp, Homo sapiens
ctgggatttctttgtatgcca

SEQ ID NO: 714 - DNA, 21 bp, Homo sapiens
ctgggatttctttgtatgcca

SEQ ID NO: 715 - DNA, 18 bp, Homo sapiens
accttcgctctccgctct

SEQ ID NO: 716 - DNA, 21 bp, Homo sapiens
acgaccacagggaaacttctc

SEQ ID NO: 717 - DNA, 20 bp, Homo sapiens
ggcagggcaggaattagtct

SEQ ID NO: 718 - DNA, 20 bp, Homo sapiens
ggcagggcaggaattagtct

SEQ ID NO: 719 - DNA, 21 bp, Homo sapiens
gacctccttgtccatcagtga

SEQ ID NO: 720 - DNA, 21 bp, Homo sapiens
tcccagttacgtctgcgtaat

SEQ ID NO: 721 - DNA, 21 bp, Homo sapiens
gccaccttccaataaaccatt

SEQ ID NO: 722 - DNA, 21 bp, Homo sapiens
gccaccttccaataaaccatt

SEQ ID NO: 723 - DNA, 21 bp, Homo sapiens
ttaaaaacccaaagccaaagg

SEQ ID NO: 724 - DNA, 22 bp, Homo sapiens
caccatagcagagaaagaagca

SEQ ID NO: 725 - DNA, 22 bp, Homo sapiens
caccatagcagagaaagaagca

SEQ ID NO: 726 - DNA, 21 bp, Homo sapiens
gtaaggttggcagacatcagg

SEQ ID NO: 727 - DNA, 21 bp, Homo sapiens
gtaaggttggcagacatcagg

SEQ ID NO: 728 - DNA, 21 bp, Homo sapiens
ctgtgggatccttctggaatt

SEQ ID NO: 729 - DNA, 21 bp, Homo sapiens
ctgtgggatccttctggaatt

SEQ ID NO: 730 - DNA, 21 bp, Homo sapiens
ggacatcttgatgggctcata

SEQ ID NO: 731 - DNA, 21 bp, Homo sapiens
ggacatcttgatgggctcata

SEQ ID NO: 732 - DNA, 20 bp, Homo sapiens
gcctgggtacaaaggaacct

SEQ ID NO: 733 - DNA, 20 bp, Homo sapiens
gcctgggtacaaaggaacct

SEQ ID NO: 734 - DNA, 21 bp, Homo sapiens
aagaacatctttttctccccg

SEQ ID NO: 735 - DNA, 21 bp, Homo sapiens
tagaagctttttggcctgaca

SEQ ID NO: 736 - DNA, 21 bp, Homo sapiens
tagaagctttttggcctgaca

SEQ ID NO: 737 - DNA, 21 bp, Homo sapiens
atggtgagaccccgactctat

SEQ ID NO: 738 - DNA, 21 bp, Homo sapiens
atggtgagaccccgactctat

SEQ ID NO: 739 - DNA, 21 bp, Homo sapiens
ctgtggtcttgctatccttcg

SEQ ID NO: 740 - DNA, 21 bp, Homo sapiens
ctgtggtcttgctatccttcg

SEQ ID NO: 741 - DNA, 21 bp, Homo sapiens
ctgtggtcttgctatccttcg

SEQ ID NO: 742 - DNA, 21 bp, Homo sapiens
aagaaagccaagcttcttggt

SEQ ID NO: 743 - DNA, 21 bp, Homo sapiens
agatccagacagagaggaggg

SEQ ID NO: 744 - DNA, 21 bp, Homo sapiens
agatccagacagagaggaggg

SEQ ID NO: 745 - DNA, 21 bp, Homo sapiens
agagcctacagccagttcaca

SEQ ID NO: 746 - DNA, 21 bp, Homo sapiens
agagcctacagccagttcaca

SEQ ID NO: 747 - DNA, 21 bp, Homo sapiens
agaaacctccgccatacatct

SEQ ID NO: 748 - DNA, 18 bp, Homo sapiens
gaggacgtttttgccgtc

SEQ ID NO: 749 - DNA, 21 bp, Homo sapiens
agatccagacagagaggaggg

SEQ ID NO: 750 - DNA, 21 bp, Homo sapiens
agatccagacagagaggaggg

SEQ ID NO: 751 - DNA, 21 bp, Homo sapiens
gggctgctgtgaatttgtgta

SEQ ID NO: 752 - DNA, 21 bp, Homo sapiens
gctgagtgcacaagtgagttg

SEQ ID NO: 753 - DNA, 21 bp, Homo sapiens
gggtgatatggacagcagaag

SEQ ID NO: 754 - DNA, 21 bp, Homo sapiens
gggtgatatggacagcagaag

SEQ ID NO: 755 - DNA, 21 bp, Homo sapiens
tttctcgttttccaaaagcct

SEQ ID NO: 756 - DNA, 22 bp, Homo sapiens
gccaagtcaaagagaagaaacc

SEQ ID NO: 757 - DNA, 22 bp, Homo sapiens
gccaagtcaaagagaagaaacc

SEQ ID NO: 758 - DNA, 22 bp, Homo sapiens
aaaaatcatgtggtcaaaagga

SEQ ID NO: 759 - DNA, 22 bp, Homo sapiens
aaaaatcatgtggtcaaaagga

SEQ ID NO: 760 - DNA, 24 bp, Homo sapiens
caattacatcctctcattgtttgc

SEQ ID NO: 761 - DNA, 24 bp, Homo sapiens
caattacatcctctcattgtttgc

SEQ ID NO: 762 - DNA, 21 bp, Homo sapiens
tggggcactgtctttcattag

SEQ ID NO: 763 - DNA, 21 bp, Homo sapiens
tggggcactgtctttcattag

SEQ ID NO: 764 - DNA, 21 bp, Homo sapiens
ccgagttctctagggattgct

SEQ ID NO: 765 - DNA, 21 bp, Homo sapiens
ccgagttctctagggattgct

SEQ ID NO: 766 - DNA, 22 bp, Homo sapiens
caacaaattagtgggttggagg

SEQ ID NO: 767 - DNA, 21 bp, Homo sapiens
tgagctctgcacagcactaga

SEQ ID NO: 768 - DNA, 21 bp, Homo sapiens
tgagctctgcacagcactaga

SEQ ID NO: 769 - DNA, 21 bp, Homo sapiens
tgttaccccgtacagacaagg

SEQ ID NO: 770 - DNA, 21 bp, Homo sapiens
tgttaccccgtacagacaagg

SEQ ID NO: 771 - DNA, 21 bp, Homo sapiens
cccttctgggcagagaatatc

SEQ ID NO: 772 - DNA, 21 bp, Homo sapiens
cccttctgggcagagaatatc

SEQ ID NO: 773 - DNA, 21 bp, Homo sapiens
cccttctgggcagagaatatc

SEQ ID NO: 774 - DNA, 21 bp, Homo sapiens
tctgggtttcctcctaccact

SEQ ID NO: 775 - DNA, 21 bp, Homo sapiens
ggtgttttaccggagacatca

SEQ ID NO: 776 - DNA, 21 bp, Homo sapiens
ggtgttttaccggagacatca

SEQ ID NO: 777 - DNA, 21 bp, Homo sapiens
cagaagctgtcctgtttcctg

SEQ ID NO: 778 - DNA, 21 bp, Homo sapiens
cagaagctgtcctgtttcctg

SEQ ID NO: 779 - DNA, 18 bp, Homo sapiens
accttcgctctccgctct

SEQ ID NO: 780 - DNA, 21 bp, Homo sapiens
ctctgtgctgggacagtttgt

SEQ ID NO: 781 - DNA, 21 bp, Homo sapiens
ggtgttttaccggagacatca

SEQ ID NO: 782 - DNA, 21 bp, Homo sapiens
ggtgttttaccggagacatca

SEQ ID NO: 783 - DNA, 21 bp, Homo sapiens
aatcctggtctccaggttgtt

SEQ ID NO: 784 - DNA, 21 bp, Homo sapiens
acgtagcaccctttgcttttc

SEQ ID NO: 785 - DNA, 21 bp, Homo sapiens
ttgctgagacaggaacagtcc

SEQ ID NO: 786 - DNA, 21 bp, Homo sapiens
ttgctgagacaggaacagtcc

SEQ ID NO: 787 - DNA, 21 bp, Homo sapiens
ttttgaaaagaaccacatggc

SEQ ID NO: 788 - DNA, 21 bp, Homo sapiens
cagctgtgtcacaagtcctca

SEQ ID NO: 789 - DNA, 21 bp, Homo sapiens
cagctgtgtcacaagtcctca

SEQ ID NO: 790 - DNA, 21 bp, Homo sapiens
tcattcatgtccttgccctta

SEQ ID NO: 791 - DNA, 21 bp, Homo sapiens
tcattcatgtccttgccctta

SEQ ID NO: 792 - DNA, 21 bp, Homo sapiens
gcacacaggaagaacacacaa

SEQ ID NO: 793 - DNA, 21 bp, Homo sapiens
gcacacaggaagaacacacaa

SEQ ID NO: 794 - DNA, 21 bp, Homo sapiens
gatctggagcgactgtttctg

SEQ ID NO: 795 - DNA, 21 bp, Homo sapiens
gatctggagcgactgtttctg

SEQ ID NO: 796 - DNA, 21 bp, Homo sapiens
ctttcaacatccatttgtggg

SEQ ID NO: 797 - DNA, 21 bp, Homo sapiens
ctttcaacatccatttgtggg

SEQ ID NO: 798 - DNA, 19 bp, Homo sapiens
ctacgccatgctttccctg

SEQ ID NO: 799 - DNA, 21 bp, Homo sapiens
ttgggggagaaactggagtat

SEQ ID NO: 800 - DNA, 21 bp, Homo sapiens
ttgggggagaaactggagtat

SEQ ID NO: 801 - DNA, 21 bp, Homo sapiens
aaaaattagctgggtgtggct

SEQ ID NO: 802 - DNA, 21 bp, Homo sapiens
aaaaattagctgggtgtggct

SEQ ID NO: 803 - DNA, 21 bp, Homo sapiens
cactcttgtcctgctgacctc

SEQ ID NO: 804 - DNA, 21 bp, Homo sapiens
cactcttgtcctgctgacctc

SEQ ID NO: 805 - DNA, 21 bp, Homo sapiens
cactcttgtcctgctgacctc

SEQ ID NO: 806 - DNA, 21 bp, Homo sapiens
tcaatgctgttttaattccgc

SEQ ID NO: 807 - DNA, 21 bp, Homo sapiens
ggttgtgctgctgctattcat

SEQ ID NO: 808 - DNA, 21 bp, Homo sapiens
ggttgtgctgctgctattcat

SEQ ID NO: 809 - DNA, 21 bp, Homo sapiens
gccacccataaactgatctga

SEQ ID NO: 810 - DNA, 21 bp, Homo sapiens
gccacccataaactgatctga

SEQ ID NO: 811 - DNA, 21 bp, Homo sapiens
agaaacctccgccatacatct

SEQ ID NO: 812 - DNA, 21 bp, Homo sapiens
gagctacgcaaacatggaaat

SEQ ID NO: 813 - DNA, 21 bp, Homo sapiens
ggttgtgctgctgctattcat

SEQ ID NO: 814 - DNA, 21 bp, Homo sapiens
ggttgtgctgctgctattcat

SEQ ID NO: 815 - DNA, 21 bp, Homo sapiens
tgagggacagttgcttttcag

SEQ ID NO: 816 - DNA, 21 bp, Homo sapiens
tgccctgggtttctttaatct

SEQ ID NO: 817 - DNA, 21 bp, Homo sapiens
tattgcacaaccatctgtccc

SEQ ID NO: 818 - DNA, 21 bp, Homo sapiens
tattgcacaaccatctgtccc

SEQ ID NO: 819 - DNA, 21 bp, Homo sapiens
agtgggatctttggaggaaaa

SEQ ID NO: 820 - DNA, 21 bp, Homo sapiens
acatctggaacccctcaaaag

SEQ ID NO: 821 - DNA, 21 bp, Homo sapiens
acatctggaacccctcaaaag

SEQ ID NO: 822 - DNA, 23 bp, Homo sapiens
tcttcagcaaaatttccattgtt

SEQ ID NO: 823 - DNA, 23 bp, Homo sapiens
tcttcagcaaaatttccattgtt

SEQ ID NO: 824 - DNA, 21 bp, Homo sapiens
cctcccccatgtctctctatc

SEQ ID NO: 825 - DNA, 21 bp, Homo sapiens
cctcccccatgtctctctatc

SEQ ID NO: 826 - DNA, 21 bp, Homo sapiens
cacactgattacctcttccgc

SEQ ID NO: 827 - DNA, 21 bp, Homo sapiens
cacactgattacctcttccgc

SEQ ID NO: 828 - DNA, 21 bp, Homo sapiens
actttggatgcctccagtttt

SEQ ID NO: 829 - DNA, 21 bp, Homo sapiens
actttggatgcctccagtttt

SEQ ID NO: 830 - DNA, 21 bp, Homo sapiens
cggtggtgtggatttagcata

SEQ ID NO: 831 - DNA, 21 bp, Homo sapiens
ccaacagagcaggaaatgaag

SEQ ID NO: 832 - DNA, 21 bp, Homo sapiens
ccaacagagcaggaaatgaag

SEQ ID NO: 833 - DNA, 21 bp, Homo sapiens
taagtgacctgcccaaagttg

SEQ ID NO: 834 - DNA, 21 bp, Homo sapiens
taagtgacctgcccaaagttg

SEQ ID NO: 835 - protein, 353 aa, Mus musculus; identical to SEQ ID NO: 6

SEQ ID NO: 836 - protein, 352 aa, Oryctolagus cuniculus
MASQGPLELQPSNQSQLAPPNATSCSGAPDAWDLLHRLLPTFIIAIFTLGLLGNSFVLSVFLLARRRLSVAEIYLANLAASDLVFVLGLPFWAENVRNQFDWPFGAALCRIVNGVIKANLFISIFLVVAISQDRYSVLVHPMASRRGRRRRQAQATCALIWLAGGLLSTPTFVLRSVRAVPELNVSACILLLPHEAWHWLRMVELNLLGFLLPLAAILFFNCHILASLRRRGERVPSRCGGPRDSKSTALILTLVASFLVCWAPYHFFAFLECLWQVHAIGGCFWEEFTDLGLQLSNFSAFVNSCLNPVIYVFVGRLFRTKVWELCQQCSPRSLAPVSSSRRKEMLWGFWRN

SEQ ID NO: 837 - protein, 337 aa, Rattus norvegicus
MASEVLLELQPSNRSLQAPANITSCESALEDWDLLYRVLPGFVITICFFGLLGNLLVLSFFLLPWRQWWWQQRQRQQRLTIAEIYLANLAASDLVFVLGLPFWAENIGNRFNWPFGTDLCRVVSGVIKANLFVSIFLVVAISQDRYRLLVYPMTSWGYRRRRQAQATCLLIWVAGGLLSIPTFLLRSVKVVPDLNVSACILLFPHEAWHFARMVELNVLGFLLPVTAIIFFNYHILASLRGQKEASRTRCGGPKGSKTTGLILTLVASFLVCWCPYHFFAFLDFLVQVRVIQDCSWKEITDLGLQLANFFAFVNSCLNPLIYVFAGRLLKTRVLGTL

SEQ ID NO: 838 - protein, 392 aa, Mus musculus
MPCSWKLLGFLSVHEPMPTAASFGIEMFNVTTQVLGSALNGTLSKDNCPDTEWWSWLNAIQAPFLWVLFLLAALENLFVLSVFFLHKNSCTVAEIYLGNLAAADLILACGLPFWAITIANNFDWVFGEVLCRVVNTMIYMNLYSSICFLMLVSIDRYLALVKTMSMGRMRGVRWAKLYSLVIWGCTLLLSSPMLVFRTMREYSEEGHNVTACVIVYPSRSWEVFTNVLLNLVGFLLPLSVITFCTVRILQVLRNNEMKKFKEVQTERKATVLVLAVLGLFVLCWVPFQISTFLDTLLRLGVLSGCWDEHAVDVITQISSYVAYSNSGLNPLVYVIVGKRFRKKSREVYRVLCQKGGCMGEPVQMENSMGTLRTSISVERQIHKLQDWAGKKQ

SEQ ID NO: 839 - protein, 367 aa, Oryctolagus cuniculus
MLNITSQVLAPALNGSVSQSSGCPNTEWSGWLNVIQAPFLWVLFVLATLENLFVLSVFCLHKSSCTVAEVYLGNLAAADLILACGLPFWAVTIANHFDWLFGEALCRVVNTMIYMNLYSSICFLMLVSIDRYLALVKTMSIGRMRRVRWAKLYSLVIWGCTLLLSSPMLVFRTMKDYRDEGYNVTACIIDYPSRSWEVFTNVLLNLVGFLLPLSVITFCTVQILQVLRNNEMQKFKEIQTERRATVLVLAVLLLFVVCWLPFQVSTFLDTLLKLGVLSSCWDEHVIDVITQVGSFMGYSNSCLNPLVYVIVGKRFRKKSREVYRAACPKAGCVLEPVQAESSMGTLRTSISVERQIHKLPEWTRSSQ

SEQ ID NO: 840 - protein, 372 aa, Cavia porcellus
MFNITSQVSALNATLAQGNSCLDAEWWSWLNTIQAPFLWVLFVLAVLENIFVLSVFFLHKSSCTVAEIYLGNLAVADLILAFGLPFWAITIANNFDWLFGEVLCRMVNTMIQMNMYSSICFLMLVSIDRYLALVKTMSMGRMRGVRWAKLYSLVIWGCALLLSSPMLVFRTMKDYRDEGHNVTACLIIYPSLTWQVFTNVLLNLVGFLLPLSIITFCTVQIMQVLRNNEMQKFKEIQTERRATVLVLAVLLLFVVCWLPFQIGTFLDTLRLLGFLPGCWEHVIDLITQISSYLAYSNSCLNPLVYVIVGKRFRKKSREVYHGLCRSGGCVSEPAQSENSMGTLRTSISVDRQIHKLQDWARSSSEGTPPGLL

SEQ ID NO: 841 - protein, 396 aa, Rattus norvegicus
MDTRSSLCPKTQAVVAVFWGPGCHLSTCIEMFNITTQALGSAHNGTFSEVNCPDTEWWSWLNAIQAPFLWVLFLLAALENIFVLSVFCLHKTNCTVAEIYLGNLAAADLILACGLPFWAITIANNFDWLFGEVLCRVVNTMIYMNLYSSICFLMLVSIDRYLALVKTMSMGRMRGVRWAKLYSLVIWSCTLLLSSPMLVFRTMKDYREEGHNVTACVIVYPSRSWEVFTNMLLNLVGFLLPLSIITFCTVRIMQVLRNNEMKKFKEVQTEKKATVLVLAVLGLFVLCWFPFQISTFLDTLLRLGVLSGCWNERAVDIVTQISSYVAYSNSCLNPLVYVIVGKRFRKKSREVYQAICRKGGCMGESVQMENSMGTLRTSISVDRQIHKLQDWAGNKQ

SEQ ID NO: 842 - DNA, 3405 bp, homo sapiens
  misc_feature (2173)..(2173): wherein N is either a "T" or a "C".
cgcccaacccaagttcaaaggctgataagagagaaaatctcatgaggaggttttagtctagggaaagtcattcagtggatgtgatcttggctcacaggggacgatgtcaagctcttcctggctccttctcagccttgttgctgtaactgctgctcagtccaccattgaggaacaggccaagacatttttggacaagtttaaccacgaagccgaagacctgttctatcaaagttcacttgcttcttggaattataacaccaatattactgaagagaatgtccaaaacatgaataatgctggggacaaatggtctgcctttttaaaggaacagtccacacttgcccaaatgtatccactacaagaaattcagaatctcacagtcaagcttcagctgcaggctcttcagcaaaatgggtcttcagtgctctcagaagacaagagcaaacggttgaacacaattctaaatacaatgagcaccatctacagtactggaaaagtttgtaacccagataatccacaagaatgcttattacttgaaccaggtttgaatgaaataatggcaaacagtttagactacaatgagaggctctgggcttgggaaagctggagatctgaggtcggcaagcagctgaggccattatatgaagagtatgtggtcttgaaaaatgagatggcaagagcaaatcattatgaggactatggggattattggagaggagactatgaagtaaatggggtagatggctatgactacagccgcggccagttgattgaagatgtggaacatacctttgaagagattaaaccattatatgaacatcttcatgcctatgtgagggcaaagttgatgaatgcctatccttcctatatcagtccaattggatgcctccctgctcatttgcttggtgatatgtggggtagattttggacaaatctgtactctttgacagttccctttggacagaaaccaaacatagatgttactgatgcaatggtggaccaggcctgggatgcacagagaatattcaaggaggccgagaagttctttgtatctgttggtcttcctaatatgactcaaggattctgggaaaattccatgctaacggacccaggaaatgttcagaaagcagtctgccatcccacagcttgggacctggggaagggcgacttcaggatccttatgtgcacaaaggtgacaatggacgacttcctgacagctcatcatgagatggggcatatccagtatgatatggcatatgctgcacaaccttttctgctaagaaatggagctaatgaaggattccatgaagctgttggggaaatcatgtcactttctgcagccacacctaagcatttaaaatccattggtcttctgtcacccgattttcaagaagacaatgaaacagaaataaacttcctgctcaaacaagcactcacgattgttgggactctgccatttacttacatgttagagaagtggaggtggatggtctttaaaggggaaattcccaaagaccagtggatgaaaaagtggtgggagatgaagcgagagatagttggggtggtggaacctgtgccccatgatgaaacatactgtgaccccgcatctctgttccatgtttctaatgattactcattcattcgatattacacaaggaccctttaccaattccagtttcaagaagcactttgtcaagcagctaaacatgaaggccctctgcacaaatgtgacatctcaaactctacagaagctggacagaaactgttcaatatgctgaggcttggaaaatcagaaccctggaccctagcattggaaaatgttgtaggagcaaagaacatgaatgtaaggccactgctcaactactttgagcccttatttacctggctgaaagaccagaacaagaattcttttgtgggatggagtaccgactggagtccatatgcagaccaaagcatcaaagtgaggataagcctaaaatcagctcttggagataaagcatatgaatggaacgacaatgaaatgtacctgttccgatcatctgttgcatatgctatgaggcagtactttttaaaagtaaaaaatcagatgattctttttggggaggaggatgtgcgagtggctaatttgaaaccaagaatctcctttaatttctttgtcactgcacctaaaaacgtgtctgatatcattcctagaactgaagttgaaaaggccatcaggatgtcccggagccgtatcaatgatgctttccgtctgaatgacaacagcctagagtttctggggatacagccaacacttggacctcctaaccagccccctgtttccatatggctgattgtttttggagttgtgatgggagtgatagtggttggcattgtcatcctgatcttcactgggatcagagatcggaagaagaaaaataaagcaagaagtggagaaaatccttatgcctccatcgatattagcaaaggagaaaataatccaggattccaaaacactgatgatgttcagacctccttttagaaaaatctatgtttttcctcttgaggtgattttgttgtatgtaaatgttaatttcatggtatagaaaatataagatgataaagatatcattaaatgtcaaaactatgactctgttcagaaaaaaaattgtccaaagacaacatggccaaggagagagcatcttcattgacattgctttcagtatttatttctgtctctggatttgacttctgttctgtttcttaataaggattttgtattagagtatattagggaaagtgtgtatttggtctcacaggctgttcagggataatctaaatgtaaatgtctgttgaatttctgaagttgaaaacaaggatatatcattggagcaagtgttggatcttgtatggaatatggatggatcacttgtaaggacagtgcctgggaactggtgtagctgcaaggattgagaatggcatgcattagctcactttcatttaatccattgtcaaggatgacatgctttcttcacagtaactcagttcaagtactatggtgatttgcctacagtgatgtttggaatcgatcatgctttcttcaaggtgacaggtctaaagagagaagaatccagggaacaggtagaggacattgctttttcacttccaaggtgcttgatcaacatctccctgacaacacaaaactagagccaggggcctccgtgaactcccagagcatgcctgatagaaactcatttctactgttctctaactgtggagtgaatggaaattccaactgtatgttcaccctctgaagtgggtacccagtctcttaaatcttttgtatttgctcacagtgtttgagcagtgctgagcacaaagcagacactcaataaatgctagatttacacactcaaaaaaaaaaaa

SEQ ID NO: 843 - protein, 805 aa, homo sapiens [sequence omitted]

SEQ ID NO: 844 - DNA, 3733 bp, homo sapiens
  misc_feature (40)..(40): wherein N is either a "C" or a "T".
  misc_feature (47)..(47): wherein N is either an "A" or a "C".
  misc_feature (933)..(933): wherein N is either a "T" or a "C".
  misc_feature (1061)..(1061): wherein N is either a "G" or an "A".
atgttctctccctggaagatatcaatgtttctgtctgttngtgaggnctccgtgcccaccacggcctctttcagcgccgacatgctcaatgtcaccttgcaagggcccactcttaacgggacctttgcccagagcaaatgcccccaagtggagtggctgggctggctcaacaccatccagccccccttcctctgggtgctgttcgtgctggccaccctagagaacatctttgtcctcagcgtcttctgcctgcacaagagcagctgcacggtggcagagatctacctggggaacctggccgcagcagacctgatcctggcctgcgggctgcccttctgggccatcaccatctccaacaacttcgactggctctttggggagacgctctgccgcgtggtgaatgccattatctccatgaacctgtacagcagcatctgtttcctgatgctggtgagcatcgaccgctacctggccctggtgaaaaccatgtccatgggccggatgcgcggcgtgcgctgggccaagctctacagcttggtgatctgggggtgtacgctgctcctgagctcacccatgctggtgttccggaccatgaaggagtacagcgatgagggccacaacgtcaccgcttgtgtcatcagctacccatccctcatctgggaagtgttcaccaacatgctcctgaatgtcgtgggcttcctgctgcccctgagtgtcatcaccttctgcacgatgcagatcatgcaggtgctgcggaacaacgagatgcagaagttcaaggagatccagacggagaggagggccacggtgctagtcctggttgtgctgctgctattcatcatctgctggctgcccttccagatcagcaccttcctggatacgctgcatcgcctcggcatcctctccagctgccaggacgagcgcatcatcgangtaatcacacagatcgcctccttcatggcctacagcaacagctgcctcaacccactggtgtacgtgatcgtgggcaagcgcttccgaaagaagtcttgggaggtgtaccagggagtgtgccagaaagngggctgcaggtcagaacccattcagatggagaactccatgggcacactgcggacctccatctccgtggaacgccagattcacaaactgcaggactgggcagggagcagacagtgagcaaacgccagcagggctgctgtgaatttgtgtaaggattgagggacagttgcttttcagcatgggcccaggaatgccaaggagacatctatgcacgaccttgggaaatgagttgatgtctccggtaaaacaccggagactaattcctgccctgcccaattttgcagggagcatggctgtgaggatggggtgaactcacgcacagccaaggactccaaaatcacaacagcattactgttcttatttgctgccacacctgagccagcctgctccttcccaggagtggaggaggcctggggggagggagaggagtgactgagcttccctcccgtgtgttctccgtccctgccccagcaagacaacttagatctccaggagaactgccatccagctttggtgcaatggctgagtgcacaagtgagttgttgccctgggtttctttaatctattcagctagaactttgaaggacaatttcttgcattaataaaggttaagccctgaggggtccctgataacaacctggagaccaggattttatggctcccctcactgatggacaaggaggtctgtgccaaagaagaatccaataagcacatattgagcacttgctgtatatgcagtattgagcactgtaggcaagacccaagaaagagaaggagccatctccatcttgaaggaactcaaagactcaagtgggaacgactgggcactgccaccaccagaaagctgttcgacgagacggtcgagcagggtgctgtgggtgatatggacagcagaagggggagaccaaggttccagctcaaccaataactattgcacaaccacctgtccctgcctcagttcccttttatgtaacatgaagtcgttgtgagggttaaaggcagtaacaggtataaagtacttagaaaagcaaagggtgctacgtacatgtgaggcatcattacgcagacgtaactgggatatgtttactataaggaaaagacactgaggtctagaaatagctccgtggagcagaatcagtattgggagccggtggcggtgtgaagcaccagtgtctggcacacagtaggtgctcattggctcccttccacctgtcattcccaccaccctgaggccccaaccgccacacacacaggagcatttggagagaaggccatgtcttcaaagtctgatttgtgatgaggcagaggaagatatttctaatcggtcttgcccagaggatcacagtgctgagaccccccaccaccagccggtacctgggaagggggagagtgcaggcctgctcagggactgttcctgtctcagcaaccaagggattgttcctgtcaatcaatggtttattggaaggtggcccagtatgagccctagaagagtgtgaaaaggaatggcaatggtgttcaccatcggcagtgccagggcagcactcattcacttgataaatgaatatttattagctggttggagagctagaacctggagagctagaacctggagaactagaacctggagggctagaacctggagaggctagaaccaagaagggctagaacctggaggggctagaacctagagaagctaaaacctgagctagaagctggaggactagaacctggagggctggaatctgaagggctagaacctggagggctggaatctggagagctagaacctggagggctagaacctggagggctagaacctagaagggctagaacctggagggctggaatctggagagctagaacctggagggctagaacctggagggctagaacctagaagggctagaacctggagggctagaacctggcaggttagaacctagaagggctagaacctggagagccagaacctggagggctagaacctggaagggctagaacctgtagagctagaacatggagagctagaacccggcaggctagaacctggcaagctagaacctggagggaatgaacctggagggctagaacctggagaatgagaaaaatttacatggcaaagagcccataaatcctgaccaatccaactctgaattttaaagcaaaagcgtgaaaaaaaagattccctccttacccccaacccactcttttttcccaccacccactctcctctgcctcagtaagtatctggaggaagaaaacaggtgaaagaagaagtaaaaaccatttagtattagtattagaatgaagtcaaactgtgccacacatggtgaatgaaaaaaaaaaaaaagaggctgtgttttgtcacacagggcagtcattcagcaccagagcacgtgatggtctgagactctcttaggagcagagctctgccgcaatggccatgtggggatccacacctggtctgaggggcaactgagtctgcgggagaagagcggccctatgcatggtgtagatgccctgataaagaacatctgtcctgtgaaagactcaatgagctgttatgttgtaaacaggaagcatttcacatccaaacgagaaaatcatgtaaacatgtgtcttttctgtagagcataataaatggatgaggtttttgcaaaaaaaaaaaaaaaaa

SEQ ID NO: 845 - protein, 391 aa, homo sapiens
  VARIANT (14)..(14): wherein Xaa is either "Arg" or a "Cys".
  VARIANT (16)..(16): wherein Xaa is either "Asp" or a "Ala".
  VARIANT (354)..(354): wherein Xaa is either "Gly" or a "Glu".
MFSPWKISMFLSVXEXSVPTTASFSADMLNVTLQGPTLNGTFAQSKCPQVEWLGWLNTIQPPFLWVLFVLATLENIFVLSVFCLHKSSCTVAEIYLGNLAAADLILACGLPFWAITISNNFDWLFGETLCRVVNAIISMNLYSSICFLMLVSIDRYLALVKTMSMGRMRGVRWAKLYSLVIWGCTLLLSSPMLVFRTMKEYSDEGHNVTACVISYPSLIWEVFTNMLLNVVGFLLPLSVITFCTMQIMQVLRNNEMQKFKEIQTERRATVLVLVVLLLFIICWLPFQISTFLDTLHRLGILSSCQDERIIDVITQIASFMAYSNSCLNPLVYVIVGKRFRKKSWEVYQGVCQKXGCRSEPIQMENSMGTLRTSISVERQIHKLQDWAGSRQ

SEQ ID NO: 846 - DNA, 3428 bp, homo sapiens
caccctatcctacactactaggaacttgcacagtccgcctcgggcagcccaaagctcctctgcccaccctggctcccaaaaccctccaaaacaaaagaccagaaaagcactctccacccagcagccaaacgcctccttcttgacgccagcccccaccctctgtctgctcgagcccaggaaaggcctgaaggaacaggccggggaaggagccctccctctctcccttgtccctccatccacccagcgccggcatctggagaccctatggcccgggctcactggggctgctgcccctggctggtcctcctctgtgcttgtgcctggggccacacaaagccactggaccttggagggcaggatgtgagaaattgttccaccaaccccccttaccttccagttactgtggtcaataccacaatgtcactcacagccctccgccagcagatgcagacccagaatctctcagcctacatcatcccaggcacagatgctcacatgaacgagtacatcggccaacatgacgagaggcgtgcgtggattacaggctttacagggtctgcaggaactgcagtggtgactatgaagaaagcagctgtctggaccgacagtcgctactggactcaggctgagcggcaaatggactgtaattgggagctccataaggaagttggcaccactcctattgtcacctggctcctcaccgagattcctgctggagggcgtgtgggttttgaccccttcctcttgtccattgacacctgggagagttatgatctggccctccaaggctctaacagacagctggtgtccatcacaaccaatcttgtggacctggtatggggatcagagaggccaccggttccaaatcaacccatttatgccctgcaggaggcattcacagggagcacttggcaggagaaagtatctggcgtccgaagccagatgcagaagcatcaaaaggtcccgactgccgtccttctgtcggcgcttgaggagacggcctggctcttcaaccttcgagccagtgacatcccctataaccccttcttctattcctacacgctgctcacagactcttctattaggttgtttgcaaacaagagtcgctttagctccgaaaccttgagctatctgaactccagttgcacaggccccatgtgtgtgcaaatcgaggattacagccaagttcgtgacagcatccaggcctactcattgggagatgtgaggatctggattgggaccagctataccatgtatgggatctatgaaatgataccaagggagaaactcgtgacagacacctactccccagtgatgatgaccaaggcagtgaagaacagcaaggagcaggccctcctcaaggccagccacgtgcgggacgctgtggctgtgatccggtacttggtctggctggagaagaacgtgcccaaaggcacagtggatgagttttcgggggcagagatcgtggacaagttccgaggagaagaacagttctcctccggacccagttttgaaaccatctctgctagtggtttgaatgctgccctggcccactacagcccgaccaaggagctgaaccgcaagctgtcctcagatgagatgtacctgctggactctggggggcagtactgggacgggaccacagacatcaccagaacagtccactggggcaccccctctgcctttcagaaggaggcatatacccgtgtgctgataggaaatattgacctgtccaggctcatctttcccgctgctacatcagggcgaatggtggaggcctttgcccgcagagccttgtgggatgctggtctcaattatggtcatgggacaggccacggcattggcaacttcctgtgtgtgcatgagtggccagtgggattccagtccaacaacatcgctatggccaagggcatgttcacttccattgaacctggttactataaggatggagaatttgggatccgtctcgaagatgtggctctcgtggtagaagcaaagaccaagtacccaggggagctacctgaccttgtggtatcatttgtgccctatgaccggaacctcatcgatgtcagcctgctgtctcccgagcatctccagtacctgaatcgctactaccagaccatccgggagaaggtgggtccagagctgcagaggcgccagctactagaggagttcgagtggcttcaacagcacacagagcccctggccgccagggccccagacaccgcctcctgggcctctgtgttagtggtctccacccttgccatccttggctggagtgtctagaggctccagactctcctgttaaccctccatctagatggggggctcccttgcttagctcccctcaccctgcactgaacataccccaagagcccctgctggcccattgcctagaaacctttgcattcatcctccttctccaagacctatggagaaggtcccaggccccaggaaacacagggcttcttggccccagatggcacctccctgcaccccggggttgtataccacaccctgggcccctaatcccaggccccgaaataggaaagccagctagtctcttctcttctgtgatctcagtaggcctaacctataacctaacacagactgctacagctgctcccctcccgccaaacaaagccccaagaaaacaatgcccctaccacccaagggtgccatggtcccgggaaaacccaacctgtcaccgcgtgttgggcgtaaccagaactgttcccccccaccagggcttaaaaatcgcccccactttttaaccatcgtccattaaccacctggtgggcatagccagagctgttcgaacccagccagggatgaaaaatcaacccccgacatggaacccatgattcctaaacccggggtaggttccatgccaagtaacagcagagggagttaagccataggaatttggctgtggagtaagagggaatgcggtgaggcagtgtggaatatgaccctaccagaggttggagaacaaacttgggcagccggaacccgtcactattttagattcctggcattcgaggagccctttgaactttccaaagtgcagccacagctacaatgctgttaaatcctcccacatttcttggatgccccttcaccttgtgtggacagtgtctggtttccccattttacagacaggaaaactgagcttcagacagggggtgggctttgcctaaggacacacaaatttggttgggagttgatggggccagatgagccagcattccagctgtttcacccttcagcaacatgcagagtccctgagcccacctcccagccctctcctcattctctgaacccactgtggtgagaagaatttgctccggccaaattggccgttagccacctgggtccacatcctgctaagacgtttaaaacagcctaacaaagacacttgcctgtgg

SEQ ID NO: 847 - protein, 673 aa, homo sapiens; identical to SEQ ID NO: 2

SEQ ID NO: 848 - DNA, 1082 bp, homo sapiens
ctgtgcatggcatcatcctggccccctctagagctccaatcctccaaccagagccagctcttccctcaaaatgctacggcctgtgacaatgctccagaagcctgggacctgctgcacagagtgctgccgacatttatcatctccatctgtttcttcggcctcctagggaacctttttgtcctgttggtcttcctcctgccccggcggcaactgaacgtggcagaaatctacctggccaacctggcagcctctgatctggtgtttgtcttgggcttgcccttctgggcagagaatatctggaaccagtttaactggcctttcggagccctcctctgccgtgtcatcaacggggtcatcaaggccaatttgttcatcagcatcttcctggtggtggccatcagccaggaccgctaccgcgtgctggtgcaccctatggccagcggaaggcagcagcggcggaggcaggcccgggtcacctgcgtgctcatctgggttgtggggggcctcttgagcatccccacattcctgctgcgatccatccaagccgtcccagatctgaacatcaccgcctgcatcctgctcctcccccatgaggcctggcactttgcaaggattgtggagttaaatattctgggtttcctcctaccactggctgcgatcgtcttcttcaactaccacatcctggcctccctgcgaacgcgggaggaggtcagcaggacaagagtgcaggggccgaaggatagcaagaccacagcgctgatcctcacgctcgtggttgccttcctggtctgctgggccccttaccacttctttgccttcctggaattcttattccaggtgcaagcagtccgaggctgcttttgggaggacttcattgacctgggcctgcaattggccaacttctttgccttcactaacagctccctgaatccagtaatttatgtctttgtgggccggctcttcaggaccaaggtctgggaactttataaacaatgcacccctaaaagtcttgctccaatatcttcatcccataggaaagaaatcttccaacttttctggcggaattaaaacagcattgaacc

SEQ ID NO: 849 - protein, 353 aa, homo sapiens
MASSWPPLELQSSNQSQLFPQNATACDNAPEAWDLLHRVLPTFIISICFFGLLGNLFVLLVFLLPRRQLNVAEIYLANLAASDLVFVLGLPFWAENIWNQFNWPFGALLCRVINGVIKANLFISIFLVVAISQDRYRVLVHPMASGRQQRRRQARVTCVLIWVVGGLLSIPTFLLRSIQAVPDLNITACILLLPHEAWHFARIVELNILGFLLPLAAIVFFNYHILASLRTREEVSRTRVQGPKDSKTTALILTLVVAFLVCWAPYHFFAFLEFLFQVQAVRGCFWEDFIDLGLQLANFFAFTNSSLNPVIYVFVGRLFRTKVWELYKQCTPKSLAPISSSHRKEIFQLFWRN

SEQ ID NO: 850 - DNA, 3733 bp, homo sapiens
atgttctctccctggaagatatcaatgtttctgtctgttcgtgaggcctccgtgcccaccacggcctctttcagcgccgacatgctcaatgtcaccttgcaagggcccactcttaacgggacctttgcccagagcaaatgcccccaagtggagtggctgggctggctcaacaccatccagccccccttcctctgggtgctgttcgtgctggccaccctagagaacatctttgtcctcagcgtcttctgcctgcacaagagcagctgcacggtggcagagatctacctggggaacctggccgcagcagacctgatcctggcctgcgggctgcccttctgggccatcaccatctccaacaacttcgactggctctttggggagacgctctgccgcgtggtgaatgccattatctccatgaacctgtacagcagcatctgtttcctgatgctggtgagcatcgaccgctacctggccctggtgaaaaccatgtccatgggccggatgcgcggcgtgcgctgggccaagctctacagcttggtgatctgggggtgtacgctgctcctgagctcacccatgctggtgttccggaccatgaaggagtacagcgatgagggccacaacgtcaccgcttgtgtcatcagctacccatccctcatctgggaagtgttcaccaacatgctcctgaatgtcgtgggcttcctgctgcccctgagtgtcatcaccttctgcacgatgcagatcatgcaggtgctgcggaacaacgagatgcagaagttcaaggagatccagacggagaggagggccacggtgctagtcctggttgtgctgctgctattcatcatctgctggctgcccttccagatcagcaccttcctggatacgctgcatcgcctcggcatcctctccagctgccaggacgagcgcatcatcgatgtaatcacacagatcgcctccttcatggcctacagcaacagctgcctcaacccactggtgtacgtgatcgtgggcaagcgcttccgaaagaagtcttgggaggtgtaccagggagtgtgccagaaagggggctgcaggtcagaacccattcagatggagaactccatgggcacactgcggacctccatctccgtggaacgccagattcacaaactgcaggactgggcagggagcagacagtgagcaaacgccagcagggctgctgtgaatttgtgtaaggattgagggacagttgcttttcagcatgggcccaggaatgccaaggagacatctatgcacgaccttgggaaatgagttgatgtctccggtaaaacaccggagactaattcctgccctgcccaattttgcagggagcatggctgtgaggatggggtgaactcacgcacagccaaggactccaaaatcacaacagcattactgttcttatttgctgccacacctgagccagcctgctccttcccaggagtggaggaggcctggggggagggagaggagtgactgagcttccctcccgtgtgttctccgtccctgccccagcaagacaacttagatctccaggagaactgccatccagctttggtgcaatggctgagtgcacaagtgagttgttgccctgggtttctttaatctattcagctagaactttgaaggacaatttcttgcattaataaaggttaagccctgaggggtccctgataacaacctggagaccaggattttatggctcccctcactgatggacaaggaggtctgtgccaaagaagaatccaataagcacatattgagcacttgctgtatatgcagtattgagcactgtaggcaagacccaagaaagagaaggagccatctccatcttgaaggaactcaaagactcaagtgggaacgactgggcactgccaccaccagaaagctgttcgacgagacggtcgagcagggtgctgtgggtgatatggacagcagaagggggagaccaaggttccagctcaaccaataactattgcacaaccacctgtccctgcctcagttcccttttatgtaacatgaagtcgttgtgagggttaaaggcagtaacaggtataaagtacttagaaaagcaaagggtgctacgtacatgtgaggcatcattacgcagacgtaactgggatatgtttactataaggaaaagacactgaggtctagaaatagctccgtggagcagaatcagtattgggagccggtggcggtgtgaagcaccagtgtctggcacacagtaggtgctcattggctcccttccacctgtcattcccaccaccctgaggccccaaccgccacacacacaggagcatttggagagaaggccatgtcttcaaagtctgatttgtgatgaggcagaggaagatatttctaatcggtcttgcccagaggatcacagtgctgagaccccccaccaccagccggtacctgggaagggggagagtgcaggcctgctcagggactgttcctgtctcagcaaccaagggattgttcctgtcaatcaatggtttattggaaggtggcccagtatgagccctagaagagtgtgaaaaggaatggcaatggtgttcaccatcggcagtgccagggcagcactcattcacttgataaatgaatatttattagctggttggagagctagaacctggagagctagaacctggagaactagaacctggagggctagaacctggagaggctagaaccaagaagggctagaacctggaggggctagaacctagagaagctaaaacctgagctagaagctggaggactagaacctggagggctggaatctgaagggctagaacctggagggctggaatctggagagctagaacctggagggctagaacctggagggctagaacctagaagggctagaacctggagggctggaatctggagagctagaacctggagggctagaacctggagggctagaacctagaagggctagaacctggagggctagaacctggcaggttagaacctagaagggctagaacctggagagccagaacctggagggctagaacctggaagggctagaacctgtagagctagaacatggagagctagaacccggcaggctagaacctggcaagctagaacctggagggaatgaacctggagggctagaacctggagaatgagaaaaatttacatggcaaagagcccataaatcctgaccaatccaactctgaattttaaagcaaaagcgtgaaaaaaaagattccctccttacccccaacccactcttttttcccaccacccactctcctctgcctcagtaagtatctggaggaagaaaacaggtgaaagaagaagtaaaaaccatttagtattagtattagaatgaagtcaaactgtgccacacatggtgaatgaaaaaaaaaaaaaagaggctgtgttttgtcacacagggcagtcattcagcaccagagcacgtgatggtctgagactctcttaggagcagagctctgccgcaatggccatgtggggatccacacctggtctgaggggcaactgagtctgcgggagaagagcggccctatgcatggtgtagatgccctgataaagaacatctgtcctgtgaaagactcaatgagctgttatgttgtaaacaggaagcatttcacatccaaacgagaaaatcatgtaaacatgtgtcttttctgtagagcataataaatggatgaggtttttgcaaaaaaaaaaaaaaaaa

SEQ ID NO: 851 - protein, 391 aa, homo sapiens
MFSPWKISMFLSVREASVPTTASFSADMLNVTLQGPTLNGTFAQSKCPQVEWLGWLNTIQPPFLWVLFVLATLENIFVLSVFCLHKSSCTVAEIYLGNLAAADLILACGLPFWAITISNNFDWLFGETLCRVVNAIISMNLYSSICFLMLVSIDRYLALVKTMSMGRMRGVRWAKLYSLVIWGCTLLLSSPMLVFRTMKEYSDEGHNVTACVISYPSLIWEVFTNMLLNVVGFLLPLSVITFCTMQIMQVLRNNEMQKFKEIQTERRATVLVLVVLLLFIICWLPFQISTFLDTLHRLGILSSCQDERIIDVITQIASFMAYSNSCLNPLVYVIVGKRFRKKSWEVYQGVCQKGGCRSEPIQMENSMGTLRTSISVERQIHKLQDWAGSRQ

SEQ ID NO: 852 - DNA, 1284 bp, homo sapiens
atgcatcttatcgactacctgctcctcctgctggttggactactggccctttctcatggccagctgcacgttgagcatgatggtgagagttgcagtaacagctcccaccagcagattctggagacaggtgagggctcccccagcctcaagatagcccctgccaatgctgactttgccttccgcttctactacctgatcgcttcggagaccccggggaagaacatctttttctccccgctgagcatctcggcggcctacgccatgctttccctgggggcctgctcacacagccgcagccagatccttgagggcctgggcttcaacctcaccgagctgtctgagtccgatgtccataggggcttccagcacctcctgcacactctcaacctccccggccatgggctggaaacacgcgtgggcagtgctctgttcctgagccacaacctgaagttccttgcaaaattcctgaatgacaccatggccgtctatgaggctaaactcttccacaccaacttctacgacactgtgggcacaatccagcttatcaacgaccacgtcaagaaggaaactcgagggaagattgtggatttggtcagtgagctcaagaaggacgtcttgatggtgctggtgaattacatttacttcaaagccctgtgggagaaaccattcatttcctcaaggaccactcccaaagacttctatgttgatgagaacacaacagtccgggtgcccatgatgctgcaggaccaggagcatcactggtatcttcatgacagatacttgccctgctcggtgctacggatggattacaaaggagacgcaaccgtgtttttcattctccctaaccaaggcaaaatgagggagattgaagaggttctgactccagagatgctaatgaggtggaacaacttgttgcggaagaggaatttttacaagaagctagagttgcatcttcccaagttctccatttctggctcctatgtattagatcagattttgcccaggctgggcttcacggatctgttctccaagtgggctgacttatccggcatcaccaaacagcaaaaactggaggcatccaaaagtttccacaaggccaccttggacgtggatgaggctggcaccgaggctgcagcagccacgacgttcgcgatcaaattcttctctgcccagaccaatcgccacatcctgcgattcaaccggcccttccttgtggtgatcttttccaccagcacccagagtgtcctctttctgggcaaggtcgtcgaccccacgaaaccatag

SEQ ID NO: 853 - protein, 427 aa, homo sapiens; identical to SEQ ID NO: 572

SEQ ID NO: 854 - DNA, 1284 bp, homo sapiens
atgcatcttatcgactacctgctcctcctgctggttggactactggccctttctcatggccagctgcacgttgagcatgatggtgagagttgcagtaacagctcccaccagcagattctggagacaggtgagggctcccccagcctcaagatagcccctgccaatgctgactttgccttccgcttctactacctgatcgcttcggagaccccggggaagaacatctttttctccccgctgagcatctcggcggcctacgccatgctttccctgggggcctgctcacacagccgcagccagatccttgagggcctgggcttcaacctcaccgagctgtctgagtccgatgtccataggggcttccagcacctcctgcacactctcaacctccccggccatgggctggaaacatgcgtgggcagtgctctgttcctgagccacaacctgaagttccttgcaaaattcctgaatgacaccatggccgtctatgaggctaaactcttccacaccaacttctacgacactgtgggcacaatccagcttatcaacgaccacgtcaagaaggaaactcgagggaagattgtggatttggtcagtgagctcaagaaggacgtcttgatggtgctggtgaattacatttacttcaaagccctgtgggagaaaccattcatttcctcaaggaccactcccaaagacttctatgttgatgagaacacaacagtccgggtgcccatgatgctgcaggaccaggagcatcactggtatcttcatgacagatacttgccctgctcggtgctacggatggattacaaaggagacgcaaccgtgtttttcattctccctaaccaaggcaaaatgagggagattgaagaggttctgactccagagatgctaatgaggtggaacaacttgttgcggaagaggaatttttacaagaagctagagttgcatcttcccaagttctccatttctggctcctatgtattagatcagattttgcccaggctgggcttcacggatctgttctccaagtgggctgacttatccggcatcaccaaacagcaaaaactggaggcatccaaaagtttccacaaggccaccttggacgtggatgaggctggcaccgaggctgcagcagccaccacgttcgcgatcaaattcttctctgcccagaccaatcgccacatcctgcgattcaaccggcccttccttgtggtgatcttttccaccagcacccagagtgtcctctttctgggcaaggtcgtcgaccccacgaaaccatag

SEQ ID NO: 855 - protein, 427 aa, homo sapiens
MHLIDYLLLLLVGLLALSHGQLHVEHDGESCSNSSHQQILETGEGSPSLKIAPANADFAFRFYYLIASETPGKNIFFSPLSISAAYAMLSLGACSHSRSQILEGLGFNLTELSESDVHRGFQHLLHTLNLPGHGLETCVGSALFLSHNLKFLAKFLNDTMAVYEAKLFHTNFYDTVGTIQLINDHVKKETRGKIVDLVSELKKDVLMVLVNYIYFKALWEKPFISSRTTPKDFYVDENTTVRVPMMLQDQEHHWYLHDRYLPCSVLRMDYKGDATVFFILPNQGKMREIEEVLTPEMLMRWNNLLRKRNFYKKLELHLPKFSISGSYVLDQILPRLGFTDLFSKWADLSGITKQQKLEASKSFHKATLDVDEAGTEAAAATTFAIKFFSAQTNRHILRFNRPFLVVIFSTSTQSVLFLGKVVDPTKP

SEQ ID NO: 856 - DNA, 3428 bp, homo sapiens
  misc_feature (711)..(711): wherein N is either an "T" or a "C".
  misc_feature (2085)..(2085): wherein N is either an "C" or a "G".
caccctatcctacactactaggaacttgcacagtccgcctcgggcagcccaaagctcctctgcccaccctggctcccaaaaccctccaaaacaaaagaccagaaaagcactctccacccagcagccaaacgcctccttcttgacgccagcccccaccctctgtctgctcgagcccaggaaaggcctgaaggaacaggccggggaaggagccctccctctctcccttgtccctccatccacccagcgccggcatctggagaccctatggcccgggctcactggggctgctgcccctggctggtcctcctctgtgcttgtgcctggggccacacaaagccactggaccttggagggcaggatgtgagaaattgttccaccaaccccccttaccttccagttactgtggtcaataccacaatgtcactcacagccctccgccagcagatgcagacccagaatctctcagcctacatcatcccaggcacagatgctcacatgaacgagtacatcggccaacatgacgagaggcgtgcgtggattacaggctttacagggtctgcaggaactgcagtggtgactatgaagaaagcagctgtctggaccgacagtcgctactggactcaggctgagcggcaaatggactgtaattgggagctccataaggaagttggcaccactcctattgtcacctggctcctcaccgagattccngctggagggcgtgtgggttttgaccccttcctcttgtccattgacacctgggagagttatgatctggccctccaaggctctaacagacagctggtgtccatcacaaccaatcttgtggacctggtatggggatcagagaggccaccggttccaaatcaacccatttatgccctgcaggaggcattcacagggagcacttggcaggagaaagtatctggcgtccgaagccagatgcagaagcatcaaaaggtcccgactgccgtccttctgtcggcgcttgaggagacggcctggctcttcaaccttcgagccagtgacatcccctataaccccttcttctattcctacacgctgctcacagactcttctattaggttgtttgcaaacaagagtcgctttagctccgaaaccttgagctatctgaactccagttgcacaggccccatgtgtgtgcaaatcgaggattacagccaagttcgtgacagcatccaggcctactcattgggagatgtgaggatctggattgggaccagctataccatgtatgggatctatgaaatgataccaagggagaaactcgtgacagacacctactccccagtgatgatgaccaaggcagtgaagaacagcaaggagcaggccctcctcaaggccagccacgtgcgggacgctgtggctgtgatccggtacttggtctggctggagaagaacgtgcccaaaggcacagtggatgagttttcgggggcagagatcgtggacaagttccgaggagaagaacagttctcctccggacccagttttgaaaccatctctgctagtggtttgaatgctgccctggcccactacagcccgaccaaggagctgaaccgcaagctgtcctcagatgagatgtacctgctggactctggggggcagtactgggacgggaccacagacatcaccagaacagtccactggggcaccccctctgcctttcagaaggaggcatatacccgtgtgctgataggaaatattgacctgtccaggctcatctttcccgctgctacatcagggcgaatggtggaggcctttgcccgcagagccttgtgggatgctggtctcaattatggtcatgggacaggccacggcattggcaacttcctgtgtgtgcatgagtggccagtgggattccagtccaacaacatcgctatggccaagggcatgttcacttccattgaacctggttactataaggatggagaatttgggatccgtctcgaagatgtggctctcgtggtagaagcaaagaccaagtacccaggggagctacctgaccttgtggtatcatttgtgccctatgaccggaacctcatcgatgtcagcctgctgtctccngagcatctccagtacctgaatcgctactaccagaccatccgggagaaggtgggtccagagctgcagaggcgccagctactagaggagttcgagtggcttcaacagcacacagagcccctggccgccagggccccagacaccgcctcctgggcctctgtgttagtggtctccacccttgccatccttggctggagtgtctagaggctccagactctcctgttaaccctccatctagatggggggctcccttgcttagctcccctcaccctgcactgaacataccccaagagcccctgctggcccattgcctagaaacctttgcattcatcctccttctccaagacctatggagaaggtcccaggccccaggaaacacagggcttcttggccccagatggcacctccctgcaccccggggttgtataccacaccctgggcccctaatcccaggccccgaaataggaaagccagctagtctcttctcttctgtgatctcagtaggcctaacctataacctaacacagactgctacagctgctcccctcccgccaaacaaagccccaagaaaacaatgcccctaccacccaagggtgccatggtcccgggaaaacccaacctgtcaccgcgtgttgggcgtaaccagaactgttcccccccaccagggcttaaaaatcgcccccactttttaaccatcgtccattaaccacctggtgggcatagccagagctgttcgaacccagccagggatgaaaaatcaacccccgacatggaacccatgattcctaaacccggggtaggttccatgccaagtaacagcagagggagttaagccataggaatttggctgtggagtaagagggaatgcggtgaggcagtgtggaatatgaccctaccagaggttggagaacaaacttgggcagccggaacccgtcactattttagattcctggcattcgaggagccctttgaactttccaaagtgcagccacagctacaatgctgttaaatcctcccacatttcttggatgccccttcaccttgtgtggacagtgtctggtttccccattttacagacaggaaaactgagcttcagacagggggtgggctttgcctaaggacacacaaatttggttgggagttgatggggccagatgagccagcattccagctgtttcacccttcagcaacatgcagagtccctgagcccacctcccagccctctcctcattctctgaacccactgtggtgagaagaatttgctccggccaaattggccgttagccacctgggtccacatcctgctaagacgtttaaaacagcctaacaaagacacttgcctgtgg

SEQ ID NO: 857 - protein, 673 aa, homo sapiens; identical to SEQ ID NO: 2

SEQ ID NO: 858 - DNA, 19 bp, homo sapiens
gagccgggtaaggtctggt

SEQ ID NO: 859 - DNA, 19 bp, homo sapiens
gctaggggcttcggacctt

SEQ ID NO: 860 - DNA, 19 bp, homo sapiens
aacaggatgtcccaacagg

SEQ ID NO: 861 - DNA, 19 bp, homo sapiens
tccaggaactgagtgccaa

SEQ ID NO: 862 - DNA, 19 bp, homo sapiens
catggtcccaggagagccc

SEQ ID NO: 863 - DNA, 17 bp, homo sapiens
cctgttgggcatagcca

SEQ ID NO: 864 - DNA, 19 bp, homo sapiens
ccctccagcaggaatctcg

SEQ ID NO: 865 - DNA, 19 bp, homo sapiens
acaaggtgcaggggccgca

SEQ ID NO: 866 - DNA, 19 bp, homo sapiens
gtgggccctgtataatcac

SEQ ID NO: 867 - DNA, 19 bp, homo sapiens
ctcaagggctcaagtgatc

SEQ ID NO: 868 - DNA, 19 bp, homo sapiens
acaagtatcaggtaatggc

SEQ ID NO: 869 - DNA, 19 bp, homo sapiens
cctctcttattacacttcc

SEQ ID NO: 870 - DNA, 19 bp, homo sapiens
gttgtgagggttaaaggca

SEQ ID NO: 871 - DNA, 19 bp, homo sapiens
ggcacggagtcctcacgaa

SEQ ID NO: 872 - DNA, 19 bp, homo sapiens
aactgacctgagtacagtg

SEQ ID NO: 873 - DNA, 19 bp, homo sapiens
ctgacctgagtacagtgaa

SEQ ID NO: 874 - DNA, 19 bp, homo sapiens
tctgctccatggagctatt

SEQ ID NO: 875 - DNA, 19 bp, homo sapiens
atttctagacctcagtgtc

SEQ ID NO: 876 - DNA, 19 bp, homo sapiens
gaccgtctcgtcgaacagc

SEQ ID NO: 877 - DNA, 13 bp, homo sapiens
gaagctggtggct

SEQ ID NO: 878 - DNA, 13 bp, homo sapiens
cacgcatgtttcc

SEQ ID NO: 879 - DNA, 16 bp, homo sapiens
ggtacccgtttcataa

SEQ ID NO: 880 - DNA, 18 bp, homo sapiens
atgtagatagtcttgtgg

SEQ ID NO: 881 - DNA, 14 bp, homo sapiens
ccagatgcagctag

SEQ ID NO: 882 - DNA, 14 bp, homo sapiens
cttgtgacacagct

SEQ ID NO: 883 - DNA, 16 bp, homo sapiens
aagtacatgaagaatt

SEQ ID NO: 884 - DNA, 19 bp, homo sapiens
gagccgggtgaggtctggt

SEQ ID NO: 885 - DNA, 19 bp, homo sapiens
gctaggggcctcggacctt

SEQ ID NO: 886 - DNA, 19 bp, homo sapiens
aacaggatgccccaacagg

SEQ ID NO: 887 - DNA, 19 bp, homo sapiens
tccaggaaccgagtgccaa

SEQ ID NO: 888 - DNA, 19 bp, homo sapiens
catggtcccgggagagccc

SEQ ID NO: 889 - DNA, 17 bp, homo sapiens
cctgttgggtatagcca

SEQ ID NO: 890 - DNA, 19 bp, homo sapiens
ccctccagcgggaatctcg

SEQ ID NO: 891 - DNA, 19 bp, homo sapiens
acaaggtgcgggggccgca

SEQ ID NO: 892 - DNA, 19 bp, homo sapiens
gtgggccctatataatcac

SEQ ID NO: 893 - DNA, 19 bp, homo sapiens
ctcaagggcgcaagtgatc

SEQ ID NO: 894 - DNA, 19 bp, homo sapiens
acaagtatcgggtaatggc

SEQ ID NO: 895 - DNA, 19 bp, homo sapiens
cctctcttactacacttcc

SEQ ID NO: 896 - DNA, 19 bp, homo sapiens
gttgtgaggattaaaggca

SEQ ID NO: 897 - DNA, 19 bp, homo sapiens
ggcacggaggcctcacgaa

SEQ ID NO: 898 - DNA, 19 bp, homo sapiens
aactgacctaagtacagtg

SEQ ID NO: 899 - DNA, 19 bp, homo sapiens
ctgacctgaatacagtgaa

SEQ ID NO: 900 - DNA, 19 bp, homo sapiens
tctgctccacggagctatt

SEQ ID NO: 901 - DNA, 19 bp, homo sapiens
atttctagaactcagtgtc

SEQ ID NO: 902 - DNA, 19 bp, homo sapiens
gaccgtctcatcgaacagc

SEQ ID NO: 903 - DNA, 13 bp, homo sapiens
gaagctcgtggct

SEQ ID NO: 904 - DNA, 13 bp, homo sapiens
cacgcgtgtttcc

SEQ ID NO: 905 - DNA, 16 bp, homo sapiens
ggtacccatttcataa

SEQ ID NO: 906 - DNA, 18 bp, homo sapiens
atgtagatggtcttgtgg

SEQ ID NO: 907 - DNA, 14 bp, homo sapiens
ccagaggcagctag

SEQ ID NO: 908 - DNA, 14 bp, homo sapiens
cttgtgaaacagct

SEQ ID NO: 909 - DNA, 16 bp, homo sapiens
aagtacacgaagaatt

SEQ ID NO: 910 - DNA, 41 bp, homo sapiens
ctgtggctgcaaccagacctcacccggctcctctgtttccc

SEQ ID NO: 911 - DNA, 41 bp, homo sapiens
agtccacgttgaaggtccgaggcccctagccctgtgggggc

SEQ ID NO: 912 - DNA, 41 bp, homo sapiens
ttttctagggccctgttggggcatcctgttgtgtgtgtaga

SEQ ID NO: 913 - DNA, 41 bp, homo sapiens
aaggctgaccttccaggaaccgagtgccaaaggcaaggtct

SEQ ID NO: 914 - DNA, 41 bp, homo sapiens
cccaagggtgccatggtcccgggagagcccaaacctatcac

SEQ ID NO: 915 - DNA, 41 bp, homo sapiens
acctatcaccacctgttgggcatagccagagctgttcccac

SEQ ID NO: 916 - DNA, 41 bp, homo sapiens
tggctcctcaccgagattcctgctggagggcgtgtgggttt

SEQ ID NO: 917 - DNA, 41 bp, homo sapiens
ggtcagcaggacaagagtgcgggggccgaaggatagcaaga

SEQ ID NO: 918 - DNA, 41 bp, homo sapiens
gaattatccaagtgggccctatataatcacaagggtcctta

SEQ ID NO: 919 - DNA, 41 bp, homo sapiens
ctggtctcaaactcaagggctcaagtgatcctccactttgg

SEQ ID NO: 920 - DNA, 41 bp, homo sapiens
ggaaacaaataacaagtatcgggtaatggcctctcttatta

SEQ ID NO: 921 - DNA, 41 bp, homo sapiens
tcgggtaatggcctctcttattacacttccatttgtctatt

SEQ ID NO: 922 - DNA, 41 bp, homo sapiens
atacctgttactgcctttaaccctcacaacgacttcatgtt

SEQ ID NO: 923 - DNA, 41 bp, homo sapiens
aggccgtggtgggcacggagtcctcacgaacagacagaaac

SEQ ID NO: 924 - DNA, 41 bp, homo sapiens
taataactgcaaactgacctgagtacagtgaaaaatcaagc

SEQ ID NO: 925 - DNA, 41 bp, homo sapiens
ataactgcaaactgacctgagtacagtgaaaaatcaagcaa

SEQ ID NO: 926 - DNA, 41 bp, homo sapiens
ccaatactgattctgctccacggagctatttctagacctca

SEQ ID NO: 927 - DNA, 41 bp, homo sapiens
tccacggagctatttctagacctcagtgtcttttccttata

SEQ ID NO: 928 - DNA, 41 bp, homo sapiens
gcaccctgctcgaccgtctcgtcgaacagctttctggtggt

SEQ ID NO: 929 - DNA, 41 bp, homo sapiens
accgaggctgcagcagccaccacgttcgcgatcaaattctt

SEQ ID NO: 930 - DNA, 41 bp, homo sapiens
ccggccatgggctggaaacacgcgtgggcagtgctctgttc

SEQ ID NO: 931 - DNA, 41 bp, homo sapiens
gacagatgttcattatgaaacgggtaccaattctatcccca

SEQ ID NO: 932 - DNA, 41 bp, homo sapiens
tggccactgtgtatgtagatggtcttgtggcccctggagag

SEQ ID NO: 933 - DNA, 41 bp, homo sapiens
ggatattttgtgctagctgcctctggggctcacaagtgtgc

SEQ ID NO: 934 - DNA, 41 bp, homo sapiens
aaagaaacattctcagctgtgtcacaagtcctcatgagact

SEQ ID NO: 935 - DNA, 41 bp, homo sapiens
ataacaaagagccaagtacacgaagaattcatggggcttct

SEQ ID NO: 936 - DNA, 41 bp, homo sapiens
ctgtggctgcaaccagaccttacccggctcctctgtttccc

SEQ ID NO: 937 - DNA, 41 bp, homo sapiens
agtccacgttgaaggtccgaagcccctagccctgtgggggc

SEQ ID NO: 938 - DNA, 41 bp, homo sapiens
ttttctagggccctgttgggacatcctgttgtgtgtgtaga

SEQ ID NO: 939 - DNA, 41 bp, homo sapiens
aaggctgaccttccaggaactgagtgccaaaggcaaggtct

SEQ ID NO: 940 - DNA, 41 bp, homo sapiens
cccaagggtgccatggtcccaggagagcccaaacctatcac

SEQ ID NO: 941 - DNA, 41 bp, homo sapiens
acctatcaccacctgttgggtatagccagagctgttcccac

SEQ ID NO: 942 - DNA, 41 bp, homo sapiens
tggctcctcaccgagattcccgctggagggcgtgtgggttt

SEQ ID NO: 943 - DNA, 41 bp, homo sapiens
ggtcagcaggacaagagtgcaggggccgaaggatagcaaga

SEQ ID NO: 944 - DNA, 41 bp, homo sapiens
gaattatccaagtgggccctgtataatcacaagggtcctta

SEQ ID NO: 945 - DNA, 41 bp, homo sapiens
ctggtctcaaactcaagggcgcaagtgatcctccactttgg

SEQ ID NO: 946 - DNA, 41 bp, homo sapiens
ggaaacaaataacaagtatcaggtaatggcctctcttatta

SEQ ID NO: 947 - DNA, 41 bp, homo sapiens
tcgggtaatggcctctcttactacacttccatttgtctatt

SEQ ID NO: 948 - DNA, 41 bp, homo sapiens
atacctgttactgcctttaatcctcacaacgacttcatgtt

SEQ ID NO: 949 - DNA, 41 bp, homo sapiens
aggccgtggtgggcacggaggcctcacgaacagacagaaac

SEQ ID NO: 950 - DNA, 41 bp, homo sapiens
taataactgcaaactgacctaagtacagtgaaaaatcaagc

SEQ ID NO: 951 - DNA, 41 bp, homo sapiens
ataactgcaaactgacctgaatacagtgaaaaatcaagcaa

SEQ ID NO: 952 - DNA, 41 bp, homo sapiens
ccaatactgattctgctccatggagctatttctagacctca

SEQ ID NO: 953 - DNA, 41 bp, homo sapiens
tccacggagctatttctagaactcagtgtcttttccttata

SEQ ID NO: 954 - DNA, 41 bp, homo sapiens
gcaccctgctcgaccgtctcatcgaacagctttctggtggt

SEQ ID NO: 955 - DNA, 41 bp, homo sapiens
accgaggctgcagcagccacgacgttcgcgatcaaattctt

SEQ ID NO: 956 - DNA, 41 bp, homo sapiens
ccggccatgggctggaaacatgcgtgggcagtgctctgttc

SEQ ID NO: 957 - DNA, 41 bp, homo sapiens
gacagatgttcattatgaaatgggtaccaattctatcccca

SEQ ID NO: 958 - DNA, 41 bp, homo sapiens
tggccactgtgtatgtagatagtcttgtggcccctggagag

SEQ ID NO: 959 - DNA, 41 bp, homo sapiens
ggatattttgtgctagctgcatctggggctcacaagtgtgc

SEQ ID NO: 960 - DNA, 41 bp, homo sapiens
aaagaaacattctcagctgtttcacaagtcctcatgagact

SEQ ID NO: 961 - DNA, 41 bp, homo sapiens
ataacaaagagccaagtacatgaagaattcatggggcttct

SEQ ID NO: 962 - DNA, 21 bp, homo sapiens
ttttcaaagctccacatcctg

SEQ ID NO: 963 - DNA, 21 bp, homo sapiens
taaatgacaggtcagggcttg

SEQ ID NO: 964 - DNA, 21 bp, homo sapiens
taaatgacaggtcagggcttg

SEQ ID NO: 965 - DNA, 22 bp, homo sapiens
ggcccatgtcattaatgagtac

SEQ ID NO: 966 - DNA, 20 bp, homo sapiens
gaactttccaaagtgcagcc

SEQ ID NO: 967 - DNA, 20 bp, homo sapiens
gaactttccaaagtgcagcc

SEQ ID NO: 968 - DNA, 21 bp, homo sapiens
gagaatctctttccagaggcc

SEQ ID NO: 969 - DNA, 21 bp, homo sapiens
acttcccagactcaagggatc

SEQ ID NO: 970 - DNA, 21 bp, homo sapiens
acttcccagactcaagggatc

SEQ ID NO: 971 - DNA, 21 bp, homo sapiens
acttcccagactcaagggatc

SEQ ID NO: 972 - DNA, 21 bp, homo sapiens
acttcccagactcaagggatc

SEQ ID NO: 973 - DNA, 21 bp, homo sapiens
acttcccagactcaagggatc

SEQ ID NO: 974 - DNA, 21 bp, homo sapiens
gccaccttccaataaaccatt

SEQ ID NO: 975 - DNA, 21 bp, homo sapiens
acgaccacagggaaacttctc

SEQ ID NO: 976 - DNA, 21 bp, homo sapiens
acgaccacagggaaacttctc

SEQ ID NO: 977 - DNA, 21 bp, homo sapiens
acgaccacagggaaacttctc

SEQ ID NO: 978 - DNA, 21 bp, homo sapiens
tcgctgtactccttcatggtc

SEQ ID NO: 979 - DNA, 21 bp, homo sapiens
tcgctgtactccttcatggtc

SEQ ID NO: 980 - DNA, 21 bp, homo sapiens
tcgctgtactccttcatggtc

SEQ ID NO: 981 - DNA, 21 bp, homo sapiens
atttctggctctcgcagtctt

SEQ ID NO: 982 - DNA, 21 bp, homo sapiens
atggtgagaccccgactctat

SEQ ID NO: 983 - DNA, 21 bp, homo sapiens
atggtgagaccccgactctat

SEQ ID NO: 984 - DNA, 21 bp, homo sapiens
aagttagctgcagtccccact

SEQ ID NO: 985 - DNA, 21 bp, homo sapiens
ctgggttccaaagacactgaa

SEQ ID NO: 986 - DNA, 22 bp, homo sapiens
caccatagcagagaaagaagca

SEQ ID NO: 987 - DNA, 23 bp, homo sapiens
caaaatgcgatttctacaatgtt

SEQ ID NO: 988 - DNA, 20 bp, homo sapiens
tcgagttgtcctgctttcag

SEQ ID NO: 989 - DNA, 21 bp, homo sapiens
cagctctcaggccttttcatt

SEQ ID NO: 990 - DNA, 21 bp, homo sapiens
cagctctcaggccttttcatt

SEQ ID NO: 991 - DNA, 21 bp, homo sapiens
tcagggctaccttttgtcctt

SEQ ID NO: 992 - DNA, 21 bp, homo sapiens
acacatactctcaagcccacg

SEQ ID NO: 993 - DNA, 21 bp, homo sapiens
acacatactctcaagcccacg

SEQ ID NO: 994 - DNA, 21 bp, homo sapiens
tgcacgctctcacctatacct

SEQ ID NO: 995 - DNA, 20 bp, homo sapiens
cgtggtgtgttcatgcaatt

SEQ ID NO: 996 - DNA, 20 bp, homo sapiens
cgtggtgtgttcatgcaatt

SEQ ID NO: 997 - DNA, 20 bp, homo sapiens
cgtggtgtgttcatgcaatt

SEQ ID NO: 998 - DNA, 20 bp, homo sapiens
cgtggtgtgttcatgcaatt

SEQ ID NO: 999 - DNA, 20 bp, homo sapiens
cgtggtgtgttcatgcaatt

SEQ ID NO: 1000 - DNA, 21 bp, homo sapiens
gggtgatatggacagcagaag

SEQ ID NO: 1001 - DNA, 18 bp, homo sapiens
gaggacgtttttgccgtc

SEQ ID NO: 1002 - DNA, 18 bp, homo sapiens
gaggacgtttttgccgtc

SEQ ID NO: 1003 - DNA, 18 bp, homo sapiens
gaggacgtttttgccgtc

SEQ ID NO: 1004 - DNA, 21 bp, homo sapiens
tttttgtccttcccttgtgac

SEQ ID NO: 1005 - DNA, 21 bp, homo sapiens
tttttgtccttcccttgtgac

SEQ ID NO: 1006 - DNA, 21 bp, homo sapiens
tttttgtccttcccttgtgac

SEQ ID NO: 1007 - DNA, 21 bp, homo sapiens
cctttccagaggcagaaactt

SEQ ID NO: 1008 - DNA, 21 bp, homo sapiens
tgttaccccgtacagacaagg

SEQ ID NO: 1009 - DNA, 21 bp, homo sapiens
tgttaccccgtacagacaagg

SEQ ID NO: 1010 - DNA, 20 bp, homo sapiens
gcttcatcccatactgtgca

SEQ ID NO: 1011 - DNA, 21 bp, homo sapiens
tatgcaggtgacaagtctccc

SEQ ID NO: 1012 - DNA, 22 bp, homo sapiens
gccaagtcaaagagaagaaacc

SEQ ID NO: 1013 - DNA, 23 bp, homo sapiens
tggaatggaaattagaattggtt

SEQ ID NO: 1014 - DNA, 21 bp, homo sapiens
atctccatcatcttggagcct

SEQ ID NO: 1015 - DNA, 21 bp, homo sapiens
agttgagaggtagaggcagcc

SEQ ID NO: 1016 - DNA, 21 bp, homo sapiens
agttgagaggtagaggcagcc

SEQ ID NO: 1017 - DNA, 21 bp, homo sapiens
agggtttcgctgctttttaag

SEQ ID NO: 1018 - DNA, 21 bp, homo sapiens
caatgctgttaaatcctccca

SEQ ID NO: 1019 - DNA, 21 bp, homo sapiens
caatgctgttaaatcctccca

SEQ ID NO: 1020 - DNA, 21 bp, homo sapiens
acatccatcagctaatgccac

SEQ ID NO: 1021 - DNA, 21 bp, homo sapiens
ctcagcctcctgtagctgaga

SEQ ID NO: 1022 - DNA, 21 bp, homo sapiens
ctcagcctcctgtagctgaga

SEQ ID NO: 1023 - DNA, 21 bp, homo sapiens
ctcagcctcctgtagctgaga

SEQ ID NO: 1024 - DNA, 21 bp, homo sapiens
ctcagcctcctgtagctgaga

SEQ ID NO: 1025 - DNA, 21 bp, homo sapiens
ctcagcctcctgtagctgaga

SEQ ID NO: 1026 - DNA, 21 bp, homo sapiens
ttgctgagacaggaacagtcc

SEQ ID NO: 1027 - DNA, 21 bp, homo sapiens
ctctgtgctgggacagtttgt

SEQ ID NO: 1028 - DNA, 21 bp, homo sapiens
ctctgtgctgggacagtttgt

SEQ ID NO: 1029 - DNA, 21 bp, homo sapiens
ctctgtgctgggacagtttgt

SEQ ID NO: 1030 - DNA, 21 bp, homo sapiens
cccagatcaccaagctgtaga

SEQ ID NO: 1031 - DNA, 21 bp, homo sapiens
cccagatcaccaagctgtaga

SEQ ID NO: 1032 - DNA, 21 bp, homo sapiens
cccagatcaccaagctgtaga

SEQ ID NO: 1033 - DNA, 21 bp, homo sapiens
tctcttgctggcttggagata

SEQ ID NO: 1034 - DNA, 21 bp, homo sapiens
aaaaattagctgggtgtggct

SEQ ID NO: 1035 - DNA, 21 bp, homo sapiens
aaaaattagctgggtgtggct

SEQ ID NO: 1036 - DNA, 21 bp, homo sapiens
tgtccctcttgtctcacagct

SEQ ID NO: 1037 - DNA, 21 bp, homo sapiens
cctctcctcctctctgttgct

SEQ ID NO: 1038 - DNA, 21 bp, homo sapiens
cagctgtgtcacaagtcctca

SEQ ID NO: 1039 - DNA, 21 bp, homo sapiens
taaggctcactcaaaaaggca

SEQ ID NO: 1040 - DNA, 21 bp, homo sapiens
acccaagaacctgtcactcct

SEQ ID NO: 1041 - DNA, 21 bp, homo sapiens
gcaactccctactccacactg

SEQ ID NO: 1042 - DNA, 21 bp, homo sapiens
gcaactccctactccacactg

SEQ ID NO: 1043 - DNA, 21 bp, homo sapiens
cttacccttcttggttcccac

SEQ ID NO: 1044 - DNA, 21 bp, homo sapiens
ctcaccctctcttcttcctcc

SEQ ID NO: 1045 - DNA, 21 bp, homo sapiens
ctcaccctctcttcttcctcc

SEQ ID NO: 1046 - DNA, 21 bp, homo sapiens
gaacctagtccaggtcccaag

SEQ ID NO: 1047 - DNA, 21 bp, homo sapiens
tggtgtgttcatgcaatttct

SEQ ID NO: 1048 - DNA, 21 bp, homo sapiens
tggtgtgttcatgcaatttct

SEQ ID NO: 1049 - DNA, 21 bp, homo sapiens
tggtgtgttcatgcaatttct

SEQ ID NO: 1050 - DNA, 21 bp, homo sapiens
tggtgtgttcatgcaatttct

SEQ ID NO: 1051 - DNA, 21 bp, homo sapiens
tggtgtgttcatgcaatttct

SEQ ID NO: 1052 - DNA, 21 bp, homo sapiens
tattgcacaaccatctgtccc

SEQ ID NO: 1053 - DNA, 21 bp, homo sapiens
gagctacgcaaacatggaaat

SEQ ID NO: 1054 - DNA, 21 bp, homo sapiens
gagctacgcaaacatggaaat

SEQ ID NO: 1055 - DNA, 21 bp, homo sapiens
gagctacgcaaacatggaaat

SEQ ID NO: 1056 - DNA, 21 bp, homo sapiens
cttttccactttctttcagcg

SEQ ID NO: 1057 - DNA, 21 bp, homo sapiens
cttttccactttctttcagcg

SEQ ID NO: 1058 - DNA, 21 bp, homo sapiens
cttttccactttctttcagcg

SEQ ID NO: 1059 - DNA, 19 bp, homo sapiens
cagggtgtggaatgtccag

SEQ ID NO: 1060 - DNA, 21 bp, homo sapiens
taagtgacctgcccaaagttg

SEQ ID NO: 1061 - DNA, 21 bp, homo sapiens
taagtgacctgcccaaagttg

SEQ ID NO: 1062 - DNA, 21 bp, homo sapiens
ctcacctgtctcaccctcttg

SEQ ID NO: 1063 - DNA, 21 bp, homo sapiens
gtagctgccaaaccttgactg

SEQ ID NO: 1064 - DNA, 21 bp, homo sapiens
acatctggaacccctcaaaag

SEQ ID NO: 1065 - DNA, 21 bp, homo sapiens
tcttcctgggcttttcagatt

SEQ ID NO: 1066 - DNA, 22 bp, Homo sapiens
tatcatttgtgccctatgaccg

SEQ ID NO: 1067 - DNA, 26 bp, Homo sapiens
aaacttcatcatcagaggtaccaaag

SEQ ID NO: 1068 - DNA, 24 bp, Homo sapiens
atagaatgacttcctccagaggga

SEQ ID NO: 1069 - DNA, 18 bp, Homo sapiens
tccagagggactggcctg

SEQ ID NO: 1070 - DNA, 24 bp, Homo sapiens
atagaatgacttcctccagaggga

SEQ ID NO: 1071 - DNA, 18 bp, Homo sapiens
accctctgtctgctcgag

SEQ ID NO: 1072 - DNA, 23 bp, Homo sapiens
aaagaaggaaggaaggaaaggaa

SEQ ID NO: 1073 - DNA, 21 bp, Homo sapiens
aacacagcaagacccctctca

SEQ ID NO: 1074 - DNA, 20 bp, Homo sapiens
atagaatttgcagggcaggg

SEQ ID NO: 1075 - DNA, 19 bp, Homo sapiens
taccacaacaggggactgg

SEQ ID NO: 1076 - DNA, 23 bp, Homo sapiens
tttgcctaaggacacacaaattt

SEQ ID NO: 1077 - DNA, 22 bp, Homo sapiens
cgctatctgatctccatcatct

SEQ ID NO: 1078 - DNA, 27 bp, Homo sapiens
acaagtaagagtttgtttgaggaaagg

SEQ ID NO: 1079 - DNA, 23 bp, Homo sapiens
tatctttctttcagttggcacca

SEQ ID NO: 1080 - DNA, 18 bp, Homo sapiens
tccctgctgcttccccgg

SEQ ID NO: 1081 - DNA, 22 bp, Homo sapiens
tgtgtgtgcatgagtgtaggtg

SEQ ID NO: 1082 - DNA, 21 bp, Homo sapiens
atccagtaatggcaaagccag

SEQ ID NO: 1083 - DNA, 19 bp, Homo sapiens
gcaaatctcacgtctgctg

SEQ ID NO: 1084 - DNA, 26 bp, Homo sapiens
aaaactaggaaagacagaaagcacac

SEQ ID NO: 1085 - DNA, 25 bp, Homo sapiens
aacttctttgccttcactaacagct

SEQ ID NO: 1086 - DNA, 25 bp, Homo sapiens
tggacttgatgaatgttaccaaatt

SEQ ID NO: 1087 - DNA, 22 bp, Homo sapiens
ccaccgagtttctggtaatttg

SEQ ID NO: 1088 - DNA, 20 bp, Homo sapiens
tgtcatagcagcagcaggaa

SEQ ID NO: 1089 - DNA, 19 bp, Homo sapiens
tgacaatgctccagaagcc

SEQ ID NO: 1090 - DNA, 23 bp, Homo sapiens
acttttctggcggaattaaaaca

SEQ ID NO: 1091 - DNA, 22 bp, Homo sapiens
ttctgggcagagaatatctgga

SEQ ID NO: 1092 - DNA, 18 bp, Homo sapiens
atctgaacatcaccgcct

SEQ ID NO: 1093 - DNA, 29 bp, Homo sapiens
gagagcaataaatgtctgttttttgataa

SEQ ID NO: 1094 - DNA, 18 bp, Homo sapiens
ggttggggcctcagggtg

SEQ ID NO: 1095 - DNA, 21 bp, Homo sapiens
ttggatgtgaaatgcttcctg

SEQ ID NO: 1096 - DNA, 24 bp, Homo sapiens
attttctcgtttggatgtgaaatg

SEQ ID NO: 1097 - DNA, 18 bp, Homo sapiens
gccattgcggcagagctc

SEQ ID NO: 1098 - DNA, 20 bp, Homo sapiens
aagtgaatgagtgctgccct

SEQ ID NO: 1099 - DNA, 19 bp, Homo sapiens
gatgcatggatggaggagg

SEQ ID NO: 1100 - DNA, 22 bp, Homo sapiens
gatggaacagatgaaggagagg

SEQ ID NO: 1101 - DNA, 24 bp, Homo sapiens
agaagaaaagatggttagatggca

SEQ ID NO: 1102 - DNA, 26 bp, Homo sapiens
taactagtgaactgaggaatcccttt

SEQ ID NO: 1103 - DNA, 29 bp, Homo sapiens
gagagcaataaatgtctgttttttgataa

SEQ ID NO: 1104 - DNA, 20 bp, Homo sapiens
tttacactcccagggctgag

SEQ ID NO: 1105 - DNA, 23 bp, Homo sapiens
ggatttctttgtaygccacgtac

SEQ ID NO: 1106 - DNA, 18 bp, Homo sapiens
agagctggagtggcggcg

SEQ ID NO: 1107 - DNA, 24 bp, Homo sapiens
tgaatagattaaagaaacccaggg

SEQ ID NO: 1108 - DNA, 18 bp, Homo sapiens
tcgaccgtctcgtcgaac

SEQ ID NO: 1109 - DNA, 18 bp, Homo sapiens
tttgcaagggagggaatc

SEQ ID NO: 1110 - DNA, 23 bp, Homo sapiens
tagggatacaatggctaggagct

SEQ ID NO: 1111 - DNA, 19 bp, Homo sapiens
acactggtgcttcacaccg

SEQ ID NO: 1112 - DNA, 20 bp, Homo sapiens
cccttctgctgtccatatca

SEQ ID NO: 1113 - DNA, 20 bp, Homo sapiens
agtgagaggcttggagtgca

SEQ ID NO: 1114 - DNA, 18 bp, Homo sapiens
tgcagggttgcagggaga

SEQ ID NO: 1115 - DNA, 21 bp, Homo sapiens
ggctcacaactgtggaatgtc

SEQ ID NO: 1116 - DNA, 18 bp, Homo sapiens
aactgtggcccagagggt

SEQ ID NO: 1117 - DNA, 23 bp, Homo sapiens
atgtacgtagcaccctttgcttt

SEQ ID NO: 1118 - DNA, 32 bp, Homo sapiens
tatttctagacctcagtgtcttttccttatag

SEQ ID NO: 1119 - DNA, 19 bp, Homo sapiens
gagaggactctgaaggggg

SEQ ID NO: 1120 - DNA, 19 bp, Homo sapiens
attgtgacagagggtgggg

SEQ ID NO: 1121 - DNA, 18 bp, Homo sapiens
gcgaagggaaggtcgcaa

SEQ ID NO: 1122 - DNA, 18 bp, Homo sapiens
tgttgggggatgctttgg

SEQ ID NO: 1123 - DNA, 18 bp, Homo sapiens
atctctgtggcccgcacc

SEQ ID NO: 1124 - DNA, 18 bp, Homo sapiens
tatcaaaggccacagccg

SEQ ID NO: 1125 - DNA, 25 bp, Homo sapiens
atggtctctgtggttgagtagtagc

SEQ ID NO: 1126 - DNA, 21 bp, Homo sapiens
atacctggggatattttgtgc

SEQ ID NO: 1127 - DNA, 22 bp, Homo sapiens
tgcagaattcatcctgaaatga

SEQ ID NO: 1128 - DNA, 23 bp, Homo sapiens
aaaagctggtccgaccttttatt

SEQ ID NO: 1129 - DNA, 21 bp, Homo sapiens
tttgagtcamacagcatgagg

SEQ ID NO: 1130 - DNA, 22 bp, Homo sapiens
atggtcttggagtcacttcgtg

SEQ ID NO: 1131 - DNA, 26 bp, Homo sapiens
gttcgtagtctcatttccagatgatc

SEQ ID NO: 1132 - DNA, 24 bp, Homo sapiens
agcatcgaaccagagaattgtatg

SEQ ID NO: 1133 - DNA, 22 bp, Homo sapiens
cctgctgataccatcacagatg

SEQ ID NO: 1134 - DNA, 24 bp, Homo sapiens
atcgaaccagagaattgtatgtgg

SEQ ID NO: 1135 - DNA, 18 bp, Homo sapiens
acctggacccactcggct

SEQ ID NO: 1136 - DNA, 23 bp, Homo sapiens
ccagtaaaatcaaatgtgcatcc

SEQ ID NO: 1137 - DNA, 32 bp, Homo sapiens
aatagcttatccaataaggaataggttacttt

SEQ ID NO: 1138 - DNA, 18 bp, Homo sapiens
gggggttcagggcctttt

SEQ ID NO: 1139 - DNA, 19 bp, Homo sapiens
tggggccaaaggagactag

SEQ ID NO: 1140 - DNA, 25 bp, Homo sapiens
gtgttgaaacacacatatctgcaat

SEQ ID NO: 1141 - DNA, 31 bp, Homo sapiens
gtgttcaactgcaaattaaagataataaaca

SEQ ID NO: 1142 - DNA, 25 bp, Homo sapiens
aactcaaatcaagattattcccctg

SEQ ID NO: 1143 - DNA, 25 bp, Homo sapiens
ccctcacccttagatgaaagtaaaa

SEQ ID NO: 1144 - DNA, 22 bp, Homo sapiens
aggctcactcaaaaaggcaatt

SEQ ID NO: 1145 - DNA, 19 bp, Homo sapiens
caccttggacgtggatgag

SEQ ID NO: 1146 - DNA, 19 bp, Homo sapiens
cacctcctgcacactctca

SEQ ID NO: 1147 - DNA, 20 bp, Homo sapiens
agatttgggggagaaactgg

SEQ ID NO: 1148 - DNA, 25 bp, Homo sapiens
ctgtaccttcttttcatcttccctt

SEQ ID NO: 1149 - DNA, 18 bp, Homo sapiens
aaggagggctctgcccag

SEQ ID NO: 1150 - DNA, 23 bp, Homo sapiens
cttatcaacgaccacgtcaagaa

SEQ ID NO: 1151 - DNA, 24 bp, Homo sapiens
gtcaaactaaatggctgaaagtgg

SEQ ID NO: 1152 - DNA, 23 bp, Homo sapiens
agggtcaaactaaatggctgaaa

SEQ ID NO: 1153 - DNA, 25 bp, Homo sapiens
agaaactggagtatcctttcttgga

SEQ ID NO: 1154 - DNA, 18 bp, Homo sapiens
cagggtcagggagaaggc

SEQ ID NO: 1155 - DNA, 25 bp, Homo sapiens
gaggacattttgattcagactcctc

SEQ ID NO: 1156 - DNA, 20 bp, Homo sapiens
cagcctaaccctgyactggg

SEQ ID NO: 1157 - DNA, 19 bp, Homo sapiens
gaagggcagcctaaccctg

SEQ ID NO: 1158 - DNA, 22 bp, Homo sapiens
gctgagaaggggagagaatgtt

SEQ ID NO: 1159 - DNA, 18 bp, Homo sapiens
gatggagggacaagggag

SEQ ID NO: 1160 - DNA, 28 bp, Homo sapiens
gtgtaggaatagaagaaggggttatagg

SEQ ID NO: 1161 - DNA, 23 bp, Homo sapiens
gatcccagagcatctctatgagc

SEQ ID NO: 1162 - DNA, 24 bp, Homo sapiens
gtatcttttgcagttcaactcccc

SEQ ID NO: 1163 - DNA, 21 bp, Homo sapiens
gattcaggtactggagctgcg

SEQ ID NO: 1164 - DNA, 18 bp, Homo sapiens
gaggtgggctcagggact

SEQ ID NO: 1165 - DNA, 18 bp, Homo sapiens
ccgcacctggagttgggg

SEQ ID NO: 1166 - DNA, 23 bp, Homo sapiens
gagccccaaaaaagtgtaagtga

SEQ ID NO: 1167 - DNA, 20 bp, Homo sapiens
caatggacaagaggaagggg

SEQ ID NO: 1168 - DNA, 29 bp, Homo sapiens
aatatttgtgcactgatttaccagaatag

SEQ ID NO: 1169 - DNA, 25 bp, Homo sapiens
ctttgtcatttccatacctgtgaaa

SEQ ID NO: 1170 - DNA, 24 bp, Homo sapiens
gtcagccttagggtaacagttttg

SEQ ID NO: 1171 - DNA, 19 bp, Homo sapiens
caggtctgggggcacagta

SEQ ID NO: 1172 - DNA, 20 bp, Homo sapiens
tttcagaggactggcaggag

SEQ ID NO: 1173 - DNA, 28 bp, Homo sapiens
gatgaagatattggagcaagacttttag

SEQ ID NO: 1174 - DNA, 20 bp, Homo sapiens
gactctgagcctcctgcctc

SEQ ID NO: 1175 - DNA, 31 bp, Homo sapiens
ctttgaatagacaaatggaagtgtartaaga

SEQ ID NO: 1176 - DNA, 22 bp, Homo sapiens
cctggcagttagcctagaaagc

SEQ ID NO: 1177 - DNA, 21 bp, Homo sapiens
caacaggacaaaaaggttccc

SEQ ID NO: 1178 - DNA, 18 bp, Homo sapiens
accccccaatctacggga

SEQ ID NO: 1179 - DNA, 20 bp, Homo sapiens
ccaccaggaagatgctgatg

SEQ ID NO: 1180 - DNA, 21 bp, Homo sapiens
gtagttgaagaagacgatcgc

SEQ ID NO: 1181 - DNA, 19 bp, Homo sapiens
ctcacctgtgctgcttgtg

SEQ ID NO: 1182 - DNA, 18 bp, Homo sapiens
gtggcggtgtgaagcacc

SEQ ID NO: 1183 - DNA, 21 bp, Homo sapiens
gccctatgcatggtgtagatg

SEQ ID NO: 1184 - DNA, 19 bp, Homo sapiens
cggccctatgcatggtgta

SEQ ID NO: 1185 - DNA, 24 bp, Homo sapiens
aaaaaaagaggctgtgttttgtca

SEQ ID NO: 1186 - DNA, 19 bp, Homo sapiens
aaggtggcccagtatgagc

SEQ ID NO: 1187 - DNA, 23 bp, Homo sapiens
cagtgatggggaattcattatcc

SEQ ID NO: 1188 - DNA, 20 bp, Homo sapiens
cataaatgcccctcctccat

SEQ ID NO: 1189 - DNA, 21 bp, Homo sapiens
cattgagtcagggactcagca

SEQ ID NO: 1190 - DNA, 24 bp, Homo sapiens
cactctgagtccaaatgttctctc

SEQ ID NO: 1191 - DNA, 19 bp, Homo sapiens
ctcacctgtgctgcttgtg

SEQ ID NO: 1192 - DNA, 20 bp, Homo sapiens
ctcttccccagatccactgg

SEQ ID NO: 1193 - DNA, 21 bp, Homo sapiens
catacatctccgaagaaacgg

SEQ ID NO: 1194 - DNA, 19 bp, Homo sapiens
gcaggagtgcagagctcag

SEQ ID NO: 1195 - DNA, 18 bp, Homo sapiens
gttctccgtccctgcccc

SEQ ID NO: 1196 - DNA, 22 bp, Homo sapiens
gaaagagaaggagccatctcca

SEQ ID NO: 1197 - DNA, 18 bp, Homo sapiens
caaccctgcactccaagc

SEQ ID NO: 1198 - DNA, 21 bp, Homo sapiens
gtttgggaccccatgttctat

SEQ ID NO: 1199 - DNA, 23 bp, Homo sapiens
gtacatgtgaggcatcwttacgc

SEQ ID NO: 1200 - DNA, 25 bp, Homo sapiens
catcttgaaggaactcaaagactca

SEQ ID NO: 1201 - DNA, 23 bp, Homo sapiens
ctttggatgaaaaagaggaagca

SEQ ID NO: 1202 - DNA, 21 bp, Homo sapiens
caagagaaggcgtctttggat

SEQ ID NO: 1203 - DNA, 18 bp, Homo sapiens
caaagaggccctgcccga

SEQ ID NO: 1204 - DNA, 18 bp, Homo sapiens
aaccccttacccaccagc

SEQ ID NO: 1205 - DNA, 20 bp, Homo sapiens
ggagaccaaggttccagctc

SEQ ID NO: 1206 - DNA, 23 bp, Homo sapiens
gaagtcgttgtgagggttaaagg

SEQ ID NO: 1207 - DNA, 20 bp, Homo sapiens
aggtcttcacctgctctgca

SEQ ID NO: 1208 - DNA, 22 bp, Homo sapiens
caaactcagattgtgggagagc

SEQ ID NO: 1209 - DNA, 19 bp, Homo sapiens
ttgagttggttgtcggcaa

SEQ ID NO: 1210 - DNA, 20 bp, Homo sapiens
gatgctgaatggggaaaagg

SEQ ID NO: 1211 - DNA, 22 bp, Homo sapiens
catatactcgccccatgaagac

SEQ ID NO: 1212 - DNA, 21 bp, Homo sapiens
cacaacgaatggtactacggc

SEQ ID NO: 1213 - DNA, 20 bp, Homo sapiens
catcatacatcccctccagc

SEQ ID NO: 1214 - DNA, 20 bp, Homo sapiens
ctaccacgagcaagtctctg

SEQ ID NO: 1215 - DNA, 24 bp, Homo sapiens
ctgtktgactcaaaccaaatcact

SEQ ID NO: 1216 - DNA, 27 bp, Homo sapiens
tcaaaaaatctcaattcttccctatct

SEQ ID NO: 1217 - DNA, 21 bp, Homo sapiens
catggaaattcccttcatctg

SEQ ID NO: 1218 - DNA, 18 bp, Homo sapiens
cccacgaggaggagccag

SEQ ID NO: 1219 - DNA, 23 bp, Homo sapiens
acacacagcatgaagtctgtcac

SEQ ID NO: 1220 - DNA, 18 bp, Homo sapiens
cttccctggccctttctc

SEQ ID NO: 1221 - DNA, 23 bp, Homo sapiens
catacaattctctggttcgatgc

SEQ ID NO: 1222 - DNA, 18 bp, Homo sapiens
gggagaaaaagggctgca

SEQ ID NO: 1223 - DNA, 18 bp, Homo sapiens
cctttccccacctgctgg

SEQ ID NO: 1224 - DNA, 18 bp, Homo sapiens
cagcctcagccgagtggg

SEQ ID NO: 1225 - DNA, 27 bp, Homo sapiens
gaattgattatttttgagtgcacagtc

SEQ ID NO: 1226 - DNA, 24 bp, Homo sapiens
gcaaatttagccaagtcaaagaga

SEQ ID NO: 1227 - DNA, 24 bp, Homo sapiens
gctgaaagaccagaacaagaattc

SEQ ID NO: 1228 - DNA, 26 bp, Homo sapiens
tggaaaagtttgtaacccagataatc

SEQ ID NO: 1229 - DNA, 24 bp, Homo sapiens
acatggcaaagaagtaaattgctg

SEQ ID NO: 1230 - DNA, 31 bp, Homo sapiens
gttaccaaatacaacaacaataaccagtatt

SEQ ID NO: 1231 - DNA, 27 bp, Homo sapiens
tttgaaaccaagaatctcctttaattt

SEQ ID NO: 1232 - DNA, 18 bp, Homo sapiens
tgcctccctgctcatttg

SEQ ID NO: 1233 - DNA, 18 bp, Homo sapiens
atgtggcgattggtctgg

SEQ ID NO: 1234 - DNA, 23 bp, Homo sapiens
catggtgtcattcaggaattttg

SEQ ID NO: 1235 - DNA, 28 bp, Homo sapiens
cagtagaactggtctttgtattgttacc

SEQ ID NO: 1236 - DNA, 18 bp, Homo sapiens
gcagcatcatgggcaccc

SEQ ID NO: 1237 - DNA, 28 bp, Homo sapiens
gatgcaactctagcttcttgtaaaaatt

SEQ ID NO: 1238 - DNA, 29 bp, Homo sapiens
gatttagcatataccaatgatctgactct

SEQ ID NO: 1239 - DNA, 27 bp, Homo sapiens
tttcagatgagttgatttcattagtgc

SEQ ID NO: 1240 - DNA, 27 bp, Homo sapiens
cacttgtctttcagatgagttgatttc

SEQ ID NO: 1241 - DNA, 28 bp, Homo sapiens
ctgtagaggtcagtagaactggtctttg

SEQ ID NO: 1242 - DNA, 27 bp, Homo sapiens
  misc_feature (14)..(14): wherein "n" equals a C3 phosphoramidite linker.
cctcatcgatgtcngcctgctgtctcc

SEQ ID NO: 1243 - DNA, 25 bp, Homo sapiens
gtggtttgcaaaccttagcatgcac

SEQ ID NO: 1244 - DNA, 22 bp, Homo sapiens
  misc_feature (12)..(12): wherein "n" equals a C3 phosphoramidite linker.
tggaagcccagnccccagaggt

SEQ ID NO: 1245 - DNA, 25 bp, Homo sapiens
agcccaggccccagaggtyctccca

SEQ ID NO: 1246 - DNA, 27 bp, Homo sapiens
  misc_feature (12)..(12): wherein "n" equals a C3 phosphoramidite linker.
  misc_feature (14)..(14): wherein "n" equals a C3 phosphoramidite linker.
aatgttgagaangncagcctaaccctg

SEQ ID NO: 1247 - DNA, 27 bp, Homo sapiens
  misc_feature (18)..(18): wherein "n" equals a C3 phosphoramidite linker.
  misc_feature (21)..(21): wherein "n" equals a C3 phosphoramidite linker.
cccggsctcttccttcangcntttcct

SEQ ID NO: 1248 - DNA, 27 bp, Homo sapiens
  misc_feature (12)..(12): wherein "n" equals a C3 phosphoramidite linker.
agaaaagcttgnctcaggcagatcagc

SEQ ID NO: 1249 - DNA, 25 bp, Homo sapiens
tacctaaataaataataaaagccag

SEQ ID NO: 1250 - DNA, 27 bp, Homo sapiens
  misc_feature (17)..(17): wherein "n" equals a C3 phosphoramidite linker.
gcaacaagtctcctttncagaacagtc

SEQ ID NO: 1251 - DNA, 27 bp, Homo sapiens
  misc_feature (19)..(19): wherein "n" equals a C3 phosphoramidite linker.
agacttcacctcttggcancttggctt

SEQ ID NO: 1252 - DNA, 25 bp, Homo sapiens
ctgcatgttgctgaagggtgaaaga

SEQ ID NO: 1253 - DNA, 27 bp, Homo sapiens
  misc_feature (3)..(3): wherein "n" equals a C3 phosphoramidite linker.
  misc_feature (16)..(16): wherein "n" equals a C3 phosphoramidite linker.
ttngagcctgtggctncaaccagacct

SEQ ID NO: 1254 - DNA, 27 bp, Homo sapiens
  misc_feature (9)..(9): wherein "n" equals a C3 phosphoramidite linker.
  misc_feature (19)..(19): wherein "n" equals a C3 phosphoramidite linker.
ttaccctanggctgacctnccaggaac

SEQ ID NO: 1255 - DNA, 25 bp, Homo sapiens
tcacctggctcctcaccgagattcc

SEQ ID NO: 1256 - DNA, 27 bp, Homo sapiens
  misc_feature (9)..(9): wherein "n" equals a C3 phosphoramidite linker.
  misc_feature (19)..(19): wherein "n" equals a C3 phosphoramidite linker.
tatttcagnccactgacanggcctcag

SEQ ID NO: 1257 - DNA, 25 bp, Homo sapiens
accttcatagagggtataataaaag

SEQ ID NO: 1258 - DNA, 25 bp, Homo sapiens
aagagtttgtttgaggaaagggttt

SEQ ID NO: 1259 - DNA, 27 bp, Homo sapiens
  misc_feature (15)..(15): wherein "n" equals a C3 phosphoramidite linker.
  misc_feature (18)..(18): wherein "n" equals a C3 phosphoramidite linker.
gtaaaggaggtctcnatngcacagggg

SEQ ID NO: 1260 - DNA, 27 bp, Homo sapiens
  misc_feature (15)..(15): wherein "n" equals a C3 phosphoramidite linker.
cacagagtagagagnattgccacgaaa

SEQ ID NO: 1261 - DNA, 25 bp, Homo sapiens
ccagtaatttatgtctttgtgggcc

SEQ ID NO: 1262 - DNA, 25 bp, Homo sapiens
atcctgaattatccaagtgggccct

SEQ ID NO: 1263 - DNA, 25 bp, Homo sapiens
cagcaggaaacaaataacaagtatc

SEQ ID NO: 1264 - DNA, 27 bp, Homo sapiens
  misc_feature (18)..(18): wherein "n" equals a C3 phosphoramidite linker.
acaagtatcrggtaatgncctctctta

SEQ ID NO: 1265 - DNA, 27 bp, Homo sapiens
  misc_feature (14)..(14): wherein "n" equals a C3 phosphoramidite linker.
ctgggacctgctgnacagagtgctgcc

SEQ ID NO: 1266 - DNA, 27 bp, Homo sapiens
  misc_feature (9)..(9): wherein "n" equals a C3 phosphoramidite linker.
  misc_feature (11)..(11): wherein "n" equals a C3 phosphoramidite linker.
tgaaccaanangcttggctttcttatc

SEQ ID NO: 1267 - DNA, 25 bp, Homo sapiens
gagccctcctctgccgtgtcatcaa

SEQ ID NO: 1268 - DNA, 25 bp, Homo sapiens
agatctgaacatcaccgcctgcatc

SEQ ID NO: 1269 - DNA, 27 bp, Homo sapiens
  misc_feature (14)..(14): wherein "n" equals a C3 phosphoramidite linker.
  misc_feature (17)..(17): wherein "n" equals a C3 phosphoramidite linker.
cactgggcaaatcngcngggctccccc

SEQ ID NO: 1270 - DNA, 27 bp, Homo sapiens
  misc_feature (3)..(3): wherein "n" equals a C3 phosphoramidite linker.
  misc_feature (16)..(16): wherein "n" equals a C3 phosphoramidite linker.
gtnggaatgacaggtngaagggagcca

SEQ ID NO: 1271 - DNA, 27 bp, Homo sapiens
  misc_feature (16)..(16): wherein "n" equals a C3 phosphoramidite linker.
ttacaacataacagcncattgagtctt

SEQ ID NO: 1272 - DNA, 25 bp, Homo sapiens
taacagctcattgagtcttkcacag

SEQ ID NO: 1273 - DNA, 25 bp, Homo sapiens
gggcagtcattcagcaccagagcac

SEQ ID NO: 1274 - DNA, 25 bp, Homo sapiens
ccctagaagagtgtgaaaaggaatg

SEQ ID NO: 1275 - DNA, 27 bp, Homo sapiens
  misc_feature (15)..(15): wherein "n" equals a C3 phosphoramidite linker.
attccttcactcatntatnaaacaaaa

SEQ ID NO: 1276 - DNA, 25 bp, Homo sapiens
tacgttgagcgatgagccccaggtt

SEQ ID NO: 1277 - DNA, 27 bp, Homo sapiens
  misc_feature (16)..(16): wherein "n" equals a C3 phosphoramidite linker.
  misc_feature (19)..(19): wherein "n" equals a C3 phosphoramidite linker.
acaggggctggggatngcnaaatacac

SEQ ID NO: 1278 - DNA, 22 bp, Homo sapiens
gtggtgggcacggagtcctcac

SEQ ID NO: 1279 - DNA, 27 bp, Homo sapiens
  misc_feature (14)..(14): wherein "n" equals a C3 phosphoramidite linker.
gtcagggaggggcncacctgggcgcgg

SEQ ID NO: 1280 - DNA, 27 bp, Homo sapiens
  misc_feature (7)..(7): wherein "n" equals a C3 phosphoramidite linker.
tttttgnagccttaaaacccttccttc

SEQ ID NO: 1281 - DNA, 25 bp, Homo sapiens
gcagaagctgtcctgtttcctgggt

SEQ ID NO: 1282 - DNA, 27 bp, Homo sapiens
  misc_feature (19)..(19): wherein "n" equals a C3 phosphoramidite linker.
gaagtgcccaggaggctgntgacatca

SEQ ID NO: 1283 - DNA, 22 bp, Homo sapiens
  misc_feature (13)..(13): wherein "n" equals a C3 phosphoramidite linker.
cattgcaccaaanctggatggc

SEQ ID NO: 1284 - DNA, 27 bp, Homo sapiens
  misc_feature (7)..(7): wherein "n" equals a C3 phosphoramidite linker.
  misc_feature (15)..(15): wherein "n" equals a C3 phosphoramidite linker.
gctttcnggtggtgncagtgcccagtc

SEQ ID NO: 1285 - DNA, 25 bp, Homo sapiens
gagcgaagggctggctgaggtcatg

SEQ ID NO: 1286 - DNA, 25 bp, Homo sapiens
accttttgcttgatttttcactgta

SEQ ID NO: 1287 - DNA, 25 bp, Homo sapiens
ggctcccaatactgattctgctcca

SEQ ID NO: 1288 - DNA, 27 bp, Homo sapiens
  misc_feature (18)..(18): wherein "n" equals a C3 phosphoramidite linker.
acccacagcaccctgctngaccgtctc

SEQ ID NO: 1289 - DNA, 27 bp, Homo sapiens
  misc_feature (16)..(16): wherein "n" equals a C3 phosphoramidite linker.
agggttgcagggaganctgggatgagg

SEQ ID NO: 1290 - DNA, 27 bp, Homo sapiens
  misc_feature (11)..(11): wherein "n" equals a C3 phosphoramidite linker.
gctgggatgangyctggggtgctgcct

SEQ ID NO: 1291 - DNA, 25 bp, Homo sapiens
gttctctggagaaaaaactgtgctg

SEQ ID NO: 1292 - DNA, 27 bp, Homo sapiens
  misc_feature (17)..(17): wherein "n" equals a C3 phosphoramidite linker.
ccccctctccaagtctntgtcccacaa

SEQ ID NO: 1293 - DNA, 25 bp, Homo sapiens
gaagagggaactgaggcagggacag

SEQ ID NO: 1294 - DNA, 27 bp, Homo sapiens
  misc_feature (15)..(15): wherein "n" equals a C3 phosphoramidite linker.
  misc_feature (18)..(18): wherein "n" equals a C3 phosphoramidite linker.
aagggtgctacgtanatntgaggcatc

SEQ ID NO: 1295 - DNA, 25 bp, Homo sapiens
cccagcgctggggaaagaaaggaca

SEQ ID NO: 1296 - DNA, 25 bp, Homo sapiens
gagatgcggtaggaagactgttaag

SEQ ID NO: 1297 - DNA, 27 bp, Homo sapiens
  misc_feature (10)..(10): wherein "n" equals a C3 phosphoramidite linker.
  misc_feature (15)..(15): wherein "n" equals a C3 phosphoramidite linker.
aagctggaancctcnaggatgggttca

SEQ ID NO: 1298 - DNA, 22 bp, Homo sapiens
aagctctaccacgccttctcag

SEQ ID NO: 1299 - DNA, 27 bp, Homo sapiens
  misc_feature (10)..(10): wherein "n" equals a C3 phosphoramidite linker.
  misc_feature (13)..(13): wherein "n" equals a C3 phosphoramidite linker.
ggaacttgtnctnctggtcccagagca

SEQ ID NO: 1300 - DNA, 25 bp, Homo sapiens
tactggcgaagacagcggcgatggg

SEQ ID NO: 1301 - DNA, 22 bp, Homo sapiens
ccagcaggagagccaggaccca

SEQ ID NO: 1302 - DNA, 22 bp, Homo sapiens
ccaagcgcaaggtgagcagggg

SEQ ID NO: 1303 - DNA, 22 bp, Homo sapiens
  misc_feature (12)..(12): wherein "n" equals a C3 phosphoramidite linker.
aggtcggaccancttttcccaa

SEQ ID NO: 1304 - DNA, 27 bp, Homo sapiens
  misc_feature (14)..(14): wherein "n" equals a C3 phosphoramidite linker.
  misc_feature (17)..(17): wherein "n" equals a C3 phosphoramidite linker.
  misc_feature (20)..(20): wherein "n" equals a C3 phosphoramidite linker.
tccctatctttgcnacnctnatgctgt

SEQ ID NO: 1305 - DNA, 27 bp, Homo sapiens
  misc_feature (19)..(19): wherein "n" equals a C3 phosphoramidite linker.
acccatactgacccttttngcaagtcc

SEQ ID NO: 1306 - DNA, 27 bp, Homo sapiens
  misc_feature (10)..(10): wherein "n" equals a C3 phosphoramidite linker.
  misc_feature (21)..(21): wherein "n" equals a C3 phosphoramidite linker.
agagcagttngaggtcaggtncaggga

SEQ ID NO: 1307 - DNA, 25 bp, Homo sapiens
caaaatcctgcctaatgatgagtgc

SEQ ID NO: 1308 - DNA, 27 bp, Homo sapiens
  misc_feature (8)..(8): wherein "n" equals a C3 phosphoramidite linker.
tcccttgnacrcaggagtccccatccc

SEQ ID NO: 1309 - DNA, 27 bp, Homo sapiens
  misc_feature (10)..(10): wherein "n" equals a C3 phosphoramidite linker.
  misc_feature (14)..(14): wherein "n" equals a C3 phosphoramidite linker.
gctgtgaagntcgnggagttgcccacc

SEQ ID NO: 1310 - DNA, 22 bp, Homo sapiens
aaggcrgggatggggactcctg

SEQ ID NO: 1311 - DNA, 22 bp, Homo sapiens
  misc_feature (3)..(3): wherein "n" equals a C3 phosphoramidite linker.
tgnggccaccccagctgtgtca

SEQ ID NO: 1312 - DNA, 25 bp, Homo sapiens
atgtgtgtcacgttctgccatcacc

SEQ ID NO: 1313 - DNA, 27 bp, Homo sapiens
  misc_feature (17)..(17): wherein "n" equals a C3 phosphoramidite linker.
atctggaacttatagtnttgaaaagaa

SEQ ID NO: 1314 - DNA, 27 bp, Homo sapiens
  misc_feature (14)..(14): wherein "n" equals a C3 phosphoramidite linker.
  misc_feature (19)..(19): wherein "n" equals a C3 phosphoramidite linker.
gaggggttccagangtacntatattta

SEQ ID NO: 1315 - DNA, 25 bp, Homo sapiens
aagtagacaaggaatgggtgtgaaa

SEQ ID NO: 1316 - DNA, 27 bp, Homo sapiens
  misc_feature (11)..(11): wherein "n" equals a C3 phosphoramidite linker.
  misc_feature (13)..(13): wherein "n" equals a C3 phosphoramidite linker.
  misc_feature (15)..(15): wherein "n" equals a C3 phosphoramidite linker.
  misc_feature (19)..(19): wherein "n" equals a C3 phosphoramidite linker.
tcataatcacnantnaaanttagtagc

SEQ ID NO: 1317 - DNA, 25 bp, Homo sapiens
gaaattttgctgaagagaatgctaa

SEQ ID NO: 1318 - DNA, 25 bp, Homo sapiens
cacatgtaaatgactcagaataatg

SEQ ID NO: 1319 - DNA, 27 bp, Homo sapiens
  misc_feature (16)..(16): wherein "n" equals a C3 phosphoramidite linker.
ttcagttctaggaatnatatcagacac

SEQ ID NO: 1320 - DNA, 27 bp, Homo sapiens
  misc_feature (9)..(9): wherein "n" equals a C3 phosphoramidite linker.
  misc_feature (19)..(19): wherein "n" equals a C3 phosphoramidite linker.
cttggtaanaagccccatnaattcttc

SEQ ID NO: 1321 - DNA, 27 bp, Homo sapiens
  misc_feature (3)..(3): wherein "n" equals a C3 phosphoramidite linker.
  misc_feature (15)..(15): wherein "n" equals a C3 phosphoramidite linker.
ggntggcaccgaggntgcagcagccac

SEQ ID NO: 1322 - DNA, 27 bp, Homo sapiens
  misc_feature (7)..(7): wherein "n" equals a C3 phosphoramidite linker.
  misc_feature (12)..(12): wherein "n" equals a C3 phosphoramidite linker.
aacctcnccggncatgggctggaaaca

SEQ ID NO: 1323 - DNA, 27 bp, Homo sapiens
  misc_feature (2)..(2): wherein "n" equals a C3 phosphoramidite linker.
  misc_feature (18)..(18): wherein "n" equals a C3 phosphoramidite linker.
tntcttggacagatgttnattatgaaa

SEQ ID NO: 1324 - DNA, 27 bp, Homo sapiens
  misc_feature (9)..(9): wherein "n" equals a C3 phosphoramidite linker.
ccggactgntgtgttctcatcaacata

SEQ ID NO: 1325 - DNA, 27 bp, Homo sapiens
  misc_feature (17)..(17): wherein "n" equals a C3 phosphoramidite linker.
  misc_feature (20)..(20): wherein "n" equals a C3 phosphoramidite linker.
gatcctggcttgttcantantctaatg

SEQ ID NO: 1326 - DNA, 25 bp, Homo sapiens
gagggaagattgtggatttggtcag

SEQ ID NO: 1327 - DNA, 25 bp, Homo sapiens
agaccctaaaataaactctgaggat

SEQ ID NO: 1328 - DNA, 25 bp, Homo sapiens
taaaccatataaagcactccacaga

SEQ ID NO: 1329 - DNA, 27 bp, Homo sapiens
  misc_feature (10)..(10): wherein "n" equals a C3 phosphoramidite linker.
  misc_feature (17)..(17): wherein "n" equals a C3 phosphoramidite linker.
tatgaaacgngtaccanttctatcccc

SEQ ID NO: 1330 - DNA, 39 bp, Homo sapiens
tgtaaaacgacggccagtagttcctcctcctccctcact

SEQ ID NO: 1331 - DNA, 39 bp, Homo sapiens
tgtaaaacgacggccagtggcattcacaggtgattcagt

SEQ ID NO: 1332 - DNA, 39 bp, Homo sapiens
tgtaaaacgacggccagtttctgggctttaccctctctc

SEQ ID NO: 1333 - DNA, 39 bp, Homo sapiens; identical to SEQ ID NO: 1332

SEQ ID NO: 1334 - DNA, 39 bp, Homo sapiens
tgtaaaacgacggccagtccaggtgcaggattaacagac

SEQ ID NO: 1335 - DNA, 39 bp, Homo sapiens
tgtaaaacgacggccagtactaggaacttgcacagtccg

SEQ ID NO: 1336 - DNA, 39 bp, Homo sapiens
tgtaaaacgacggccagtcctcacaccctatcctacacg

SEQ ID NO: 1337 - DNA, 38 bp, Homo sapiens
tgtaaaacgacggccagtcagtgagatcttgccactgc

SEQ ID NO: 1338 - DNA, 39 bp, Homo sapiens
tgtaaaacgacggccagtcaggcagacaatgatgtgatg

SEQ ID NO: 1339 - DNA, 39 bp, Homo sapiens
tgtaaaacgacggccagttatccaggtatggtggcatgt

SEQ ID NO: 1340 - DNA, 37 bp, Homo sapiens
tgtaaaacgacggccagtcagagggaagcacgtgatg

SEQ ID NO: 1341 - DNA, 39 bp, Homo sapiens
tgtaaaacgacggccagttgtaaagccctttgcagaagt

SEQ ID NO: 1342 - DNA, 39 bp, Homo sapiens
tgtaaaacgacggccagtctctgaaaagccccagagaat

SEQ ID NO: 1343 - DNA, 39 bp, Homo sapiens
tgtaaaacgacggccagtgaggctccagactctcctgtt

SEQ ID NO: 1344 - DNA, 39 bp, Homo sapiens
tgtaaaacgacggccagtcattgcctagaaacctttgca

SEQ ID NO: 1345 - DNA, 39 bp, Homo sapiens
tgtaaaacgacggccagtagccacagctacaatgctgtt

SEQ ID NO: 1346 - DNA, 39 bp, Homo sapiens
tgtaaaacgacggccagtctgccgtcaacacagaactct

SEQ ID NO: 1347 - DNA, 39 bp, Homo sapiens
tgtaaaacgacggccagtagaagaacagttctcctccgg

SEQ ID NO: 1348 - DNA, 39 bp, Homo sapiens
tgtaaaacgacggccagtcatgccttgccttgtactttc

SEQ ID NO: 1349 - DNA, 39 bp, Homo sapiens
tgtaaaacgacggccagtatggaacacagaggggttagg

SEQ ID NO: 1350 - DNA, 39 bp, Homo sapiens
tgtaaaacgacggccagtgggttgtataccacaccctgg

SEQ ID NO: 1351 - DNA, 39 bp, Homo sapiens
tgtaaaacgacggccagtcgagataggaaagccagctag

SEQ ID NO: 1352 - DNA, 39 bp, Homo sapiens
tgtaaaacgacggccagtcacttgtggaaagcacacaga

SEQ ID NO: 1353 - DNA, 39 bp, Homo sapiens
tgtaaaacgacggccagtaggaaatttgaggccatcact

SEQ ID NO: 1354 - DNA, 39 bp, Homo sapiens
tgtaaaacgacggccagtagcagtcaagatcccttccat

SEQ ID NO: 1355 - DNA, 38 bp, Homo sapiens
tgtaaaacgacggccagtgaaagagccctccctctctc

SEQ ID NO: 1356 - DNA, 39 bp, Homo sapiens
tgtaaaacgacggccagtcaaggtggacagtcttcggta

SEQ ID NO: 1357 - DNA, 39 bp, Homo sapiens
tgtaaaacgacggccagttcctcatagcagccctattga

SEQ ID NO: 1358 - DNA, 39 bp, Homo sapiens
tgtaaaacgacggccagtatccgaagacagggagttcat

SEQ ID NO: 1359 - DNA, 39 bp, Homo sapiens; identical to SEQ ID NO: 1358

SEQ ID NO: 1360 - DNA, 39 bp, Homo sapiens
tgtaaaacgacggccagttctttgccttcctggaattct

SEQ ID NO: 1361 - DNA, 39 bp, Homo sapiens
tgtaaaacgacggccagtcgtcccagatctgaacatcac

SEQ ID NO: 1362 - DNA, 39 bp, Homo sapiens
tgtaaaacgacggccagtgaaccaagaagcttggctttc

SEQ ID NO: 1363 - DNA, 39 bp, Homo sapiens
tgtaaaacgacggccagtaacttcccagactcaagggat

SEQ ID NO: 1364 - DNA, 39 bp, Homo sapiens
tgtaaaacgacggccagtcaagtgatcctccactttggt

SEQ ID NO: 1365 - DNA, 39 bp, Homo sapiens
tgtaaaacgacggccagtcctccactttggtctcccata

SEQ ID NO: 1366 - DNA, 39 bp, Homo sapiens
tgtaaaacgacggccagtgctgtagtctgccacttcctg

SEQ ID NO: 1367 - DNA, 38 bp, Homo sapiens
tgtaaaacgacggccagtaggaccaaggtctgggaact

SEQ ID NO: 1368 - DNA, 39 bp, Homo sapiens
tgtaaaacgacggccagtgcctggaacacagaccattaa

SEQ ID NO: 1369 - DNA, 39 bp, Homo sapiens; identical to SEQ ID NO: 1363

SEQ ID NO: 1370 - DNA, 39 bp, Homo sapiens
tgtaaaacgacggccagtcccttctgggcagagaatatc

SEQ ID NO: 1371 - DNA, 39 bp, Homo sapiens; identical to SEQ ID NO: 1370

SEQ ID NO: 1372 - DNA, 36 bp, Homo sapiens
tgtaaaacgacggccagtgcatcttcctggtggtgg

SEQ ID NO: 1373 - DNA, 39 bp, Homo sapiens; identical to SEQ ID NO: 1361

SEQ ID NO: 1374 - DNA, 39 bp, Homo sapiens
tgtaaaacgacggccagtgtggtctttaaaggaggcctg

SEQ ID NO: 1375 - DNA, 39 bp, Homo sapiens
tgtaaaacgacggccagtggtctcagcactgtgatcctc

SEQ ID NO: 1376 - DNA, 39 bp, Homo sapiens
tgtaaaacgacggccagttcgggagttgtaacaaatgct

SEQ ID NO: 1377 - DNA, 39 bp, Homo sapiens
tgtaaaacgacggccagtgctatgcaaaaacctcatcca

SEQ ID NO: 1378 - DNA, 39 bp, Homo sapiens
tgtaaaacgacggccagtcatctacaccatgcatagggc

SEQ ID NO: 1379 - DNA, 39 bp, Homo sapiens
tgtaaaacgacggccagttagcctctccagttctagccc

SEQ ID NO: 1380 - DNA, 40 bp, Homo sapiens
tgtaaaacgacggccagtaataaaagaggtgctgacccac

SEQ ID NO: 1381 - DNA, 38 bp, Homo sapiens
tgtaaaacgacggccagtccaccatgacccaagtttat

SEQ ID NO: 1382 - DNA, 39 bp, Homo sapiens
tgtaaaacgacggccagtgaggaatccctttgactcacc

SEQ ID NO: 1383 - DNA, 39 bp, Homo sapiens
tgtaaaacgacggccagttggttccttcaactgttgtcc

SEQ ID NO: 1384 - DNA, 39 bp, Homo sapiens; identical to SEQ ID NO: 1374

SEQ ID NO: 1385 - DNA, 39 bp, Homo sapiens
tgtaaaacgacggccagtagatgtatggcggaggtttct

SEQ ID NO: 1386 - DNA, 39 bp, Homo sapiens
tgtaaaacgacggccagtttttggatgtaaacagtgggc

SEQ ID NO: 1387 - DNA, 39 bp, Homo sapiens
tgtaaaacgacggccagtggaagccccatgtgaataaat

SEQ ID NO: 1388 - DNA, 39 bp, Homo sapiens
tgtaaaacgacggccagtacttcagtcgctccctggtac

SEQ ID NO: 1389 - DNA, 39 bp, Homo sapiens
tgtaaaacgacggccagttctccatctgaatgggttctg

SEQ ID NO: 1390 - DNA, 39 bp, Homo sapiens
tgtaaaacgacggccagtaagcaactgtccctcaatcct

SEQ ID NO: 1391 - DNA, 39 bp, Homo sapiens
tgtaaaacgacggccagtgacctccttgtccatcagtga

SEQ ID NO: 1392 - DNA, 39 bp, Homo sapiens
tgtaaaacgacggccagtccctcacaacgacttcatgtt

SEQ ID NO: 1393 - DNA, 39 bp, Homo sapiens
tgtaaaacgacggccagtttctctccaaatgctcctgtg

SEQ ID NO: 1394 - DNA, 39 bp, Homo sapiens; identical to SEQ ID NO: 1375

SEQ ID NO: 1395 - DNA, 39 bp, Homo sapiens
tgtaaaacgacggccagtgcaggcaaataccactttcaa

SEQ ID NO: 1396 - DNA, 39 bp, Homo sapiens
tgtaaaacgacggccagtcccaatactgattctgctcca

SEQ ID NO: 1397 - DNA, 39 bp, Homo sapiens; identical to SEQ ID NO: 1383

SEQ ID NO: 1398 - DNA, 39 bp, Homo sapiens
tgtaaaacgacggccagtcctgactcaatggacgtttgt

SEQ ID NO: 1399 - DNA, 39 bp, Homo sapiens; identical to SEQ ID NO: 1398

SEQ ID NO: 1400 - DNA, 39 bp, Homo sapiens
tgtaaaacgacggccagtatcttcctctgcctcatcaca

SEQ ID NO: 1401 - DNA, 39 bp, Homo sapiens
tgtaaaacgacggccagttcagactttgaagacatggcc

SEQ ID NO: 1402 - DNA, 39 bp, Homo sapiens
tgtaaaacgacggccagttgtacgtagcaccctttgctt

SEQ ID NO: 1403 - DNA, 39 bp, Homo sapiens
tgtaaaacgacggccagtgaatcccaaagagattgaggc

SEQ ID NO: 1404 - DNA, 39 bp, Homo sapiens; identical to SEQ ID NO: 1403

SEQ ID NO: 1405 - DNA, 39 bp, Homo sapiens
tgtaaaacgacggccagttgcttcctctttttcatccaa

SEQ ID NO: 1406 - DNA, 38 bp, Homo sapiens
tgtaaaacgacggccagtggacccacaaatcaatgctt

SEQ ID NO: 1407 - DNA, 39 bp, Homo sapiens
tgtaaaacgacggccagttgctccacggagctatttcta

SEQ ID NO: 1408 - DNA, 38 bp, Homo sapiens
tgtaaaacgacggccagtgtgggaatgacaggtggaag

SEQ ID NO: 1409 - DNA, 39 bp, Homo sapiens
tgtaaaacgacggccagtagagcatcctctcttacccca

SEQ ID NO: 1410 - DNA, 39 bp, Homo sapiens
tgtaaaacgacggccagtaagcctggaagcttaggtctg

SEQ ID NO: 1411 - DNA, 39 bp, Homo sapiens
tgtaaaacgacggccagttattttctaggtggggcagct

SEQ ID NO: 1412 - DNA, 39 bp, Homo sapiens
tgtaaaacgacggccagtgaaccacaggatagagcctcc

SEQ ID NO: 1413 - DNA, 39 bp, Homo sapiens
tgtaaaacgacggccagtactacccagctcccaacagat

SEQ ID NO: 1414 - DNA, 39 bp, Homo sapiens
tgtaaaacgacggccagtggacccagatcttcaggtttc

SEQ ID NO: 1415 - DNA, 39 bp, Homo sapiens
tgtaaaacgacggccagtagagtggccaatcttccactt

SEQ ID NO: 1416 - DNA, 39 bp, Homo sapiens
tgtaaaacgacggccagtggcatggggagtcatctctac

SEQ ID NO: 1417 - DNA, 39 bp, Homo sapiens
tgtaaaacgacggccagtcagatctgggttccaaagaca

SEQ ID NO: 1418 - DNA, 39 bp, Homo sapiens
tgtaaaacgacggccagtcttttgttcaccctgtcaagc

SEQ ID NO: 1419 - DNA, 39 bp, Homo sapiens
tgtaaaacgacggccagtggctccaggaaaatgagtctt

SEQ ID NO: 1420 - DNA, 39 bp, Homo sapiens
tgtaaaacgacggccagtaaaagctggtccgacctttta

SEQ ID NO: 1421 - DNA, 39 bp, Homo sapiens
tgtaaaacgacggccagttgagggtgtttctgatggttc

SEQ ID NO: 1422 - DNA, 39 bp, Homo sapiens
tgtaaaacgacggccagtatggatttctggttccctttg

SEQ ID NO: 1423 - DNA, 39 bp, Homo sapiens
tgtaaaacgacggccagtctttaagagcaagcgaagtgg

SEQ ID NO: 1424 - DNA, 39 bp, Homo sapiens
tgtaaaacgacggccagtaattgtatgtgggggcagact

SEQ ID NO: 1425 - DNA, 39 bp, Homo sapiens
tgtaaaacgacggccagtcctgacagagcctgctgatac

SEQ ID NO: 1426 - DNA, 39 bp, Homo sapiens
tgtaaaacgacggccagtgcccagtttgttcatgtcagt

SEQ ID NO: 1427 - DNA, 39 bp, Homo sapiens; identical to SEQ ID NO: 1425

SEQ ID NO: 1428 - DNA, 39 bp, Homo sapiens
tgtaaaacgacggccagtccctacccccagtaaaatcaa

SEQ ID NO: 1429 - DNA, 39 bp, Homo sapiens
tgtaaaacgacggccagtgccgtcagagtgctgtcttat

SEQ ID NO: 1430 - DNA, 40 bp, Homo sapiens
tgtaaaacgacggccagttgacgagagtcaattgaaagga

SEQ ID NO: 1431 - DNA, 39 bp, Homo sapiens
tgtaaaacgacggccagtcaaagtagttgagcagtggcc

SEQ ID NO: 1432 - DNA, 39 bp, Homo sapiens
tgtaaaacgacggccagtaaatggcagctgtcaccatag

SEQ ID NO: 1433 - DNA, 42 bp, Homo sapiens
tgtaaaacgacggccagttctgcagagaaaataaaccactga

SEQ ID NO: 1434 - DNA, 40 bp, Homo sapiens
tgtaaaacgacggccagtgcattcttgtggattatctggg

SEQ ID NO: 1435 - DNA, 39 bp, Homo sapiens
tgtaaaacgacggccagtttgcccatagtggtaacttgc

SEQ ID NO: 1436 - DNA, 39 bp, Homo sapiens
tgtaaaacgacggccagtgcacacaggaagaacacacaa

SEQ ID NO: 1437 - DNA, 39 bp, Homo sapiens
tgtaaaacgacggccagtgtgcatgcatctgtgtgtgtt

SEQ ID NO: 1438 - DNA, 39 bp, Homo sapiens
tgtaaaacgacggccagttgctttcaaaatgcgatttct

SEQ ID NO: 1439 - DNA, 39 bp, Homo sapiens
tgtaaaacgacggccagtcaggcatgtcaggttttgaat

SEQ ID NO: 1440 - DNA, 39 bp, Homo sapiens
tgtaaaacgacggccagtcttgctgtgttatccccaaga

SEQ ID NO: 1441 - DNA, 39 bp, Homo sapiens
tgtaaaacgacggccagtaagaacatctttttctccccg

SEQ ID NO: 1442 - DNA, 39 bp, Homo sapiens
tgtaaaacgacggccagtgcaggtcatggaagtggatta

SEQ ID NO: 1443 - DNA, 39 bp, Homo sapiens
tgtaaaacgacggccagtgatctggagcgactgtttctg

SEQ ID NO: 1444 - DNA, 39 bp, Homo sapiens
tgtaaaacgacggccagtctttcaacatccatttgtggg

SEQ ID NO: 1445 - DNA, 39 bp, Homo sapiens
tgtaaaacgacggccagtcacaggaagcaacctctgaag

SEQ ID NO: 1446 - DNA, 39 bp, Homo sapiens
tgtaaaacgacggccagtccttgcaaaattcctgaatga

SEQ ID NO: 1447 - DNA, 39 bp, Homo sapiens
tgtaaaacgacggccagtccttgtctgtacggggtaaca

SEQ ID NO: 1448 - DNA, 39 bp, Homo sapiens
tgtaaaacgacggccagtaacgggtaccaattctatccc

SEQ ID NO: 1449 - DNA, 39 bp, Homo sapiens
tgtaaaacgacggccagtgattttgggtggatagaagcc

SEQ ID NO: 1450 - DNA, 38 bp, Homo sapiens
tgtaaaacgacggccagtgaagggtgcatgcctgtagt

SEQ ID NO: 1451 - DNA, 39 bp, Homo sapiens
caggaaacagctatgaccagaagctctggggtctctgat

SEQ ID NO: 1452 - DNA, 39 bp, Homo sapiens
caggaaacagctatgacccaccaggcaagcaaatcatat

SEQ ID NO: 1453 - DNA, 39 bp, Homo sapiens
caggaaacagctatgaccaggtctgagcagagacatcca

SEQ ID NO: 1454 - DNA, 39 bp, Homo sapiens; identical to SEQ ID NO: 1453

SEQ ID NO: 1455 - DNA, 39 bp, Homo sapiens; identical to SEQ ID NO: 1453

SEQ ID NO: 1456 - DNA, 39 bp, Homo sapiens
caggaaacagctatgaccatgcacataccacagaggagg

SEQ ID NO: 1457 - DNA, 39 bp, Homo sapiens; identical to SEQ ID NO: 1456

SEQ ID NO: 1458 - DNA, 40 bp, Homo sapiens
caggaaacagctatgacccaagctaaggaaaagccatacc

SEQ ID NO: 1459 - DNA, 39 bp, Homo sapiens
caggaaacagctatgacctgtgctcctctgaagtctggt

SEQ ID NO: 1460 - DNA, 39 bp, Homo sapiens
caggaaacagctatgaccatagcgatgttgttggactgg

SEQ ID NO: 1461 - DNA, 39 bp, Homo sapiens
caggaaacagctatgaccactggtttctgaaacccacct

SEQ ID NO: 1462 - DNA, 39 bp, Homo sapiens
caggaaacagctatgacccttgtcagctacaagcccaag

SEQ ID NO: 1463 - DNA, 39 bp, Homo sapiens
caggaaacagctatgaccctgttgaagccactcgaactc

SEQ ID NO: 1464 - DNA, 39 bp, Homo sapiens
caggaaacagctatgaccggagcagctgtagcagtctgt

SEQ ID NO: 1465 - DNA, 39 bp, Homo sapiens
caggaaacagctatgaccattgctctcttggggttttgt

SEQ ID NO: 1466 - DNA, 39 bp, Homo sapiens
caggaaacagctatgaccaaaacccagaggcaagtgtct

SEQ ID NO: 1467 - DNA, 39 bp, Homo sapiens
caggaaacagctatgaccgaacttgtccacgatctctgc

SEQ ID NO: 1468 - DNA, 39 bp, Homo sapiens
caggaaacagctatgaccccatgtgaactcgtgagcttt

SEQ ID NO: 1469 - DNA, 39 bp, Homo sapiens
caggaaacagctatgaccggcaactccctactccacact

SEQ ID NO: 1470 - DNA, 39 bp, Homo sapiens
caggaaacagctatgaccgtctgcaaatccacactcaca

SEQ ID NO: 1471 - DNA, 39 bp, Homo sapiens
caggaaacagctatgaccacagccaaattcctatggctt

SEQ ID NO: 1472 - DNA, 39 bp, Homo sapiens
caggaaacagctatgaccgttctccaacctctggtaggg

SEQ ID NO: 1473 - DNA, 39 bp, Homo sapiens
caggaaacagctatgacctgtcagtggcctgaaatatcc

SEQ ID NO: 1474 - DNA, 39 bp, Homo sapiens
caggaaacagctatgacccctccttctaccaaggtccat

SEQ ID NO: 1475 - DNA, 39 bp, Homo sapiens
caggaaacagctatgaccgtttcctgaacacctctggct

SEQ ID NO: 1476 - DNA, 39 bp, Homo sapiens
caggaaacagctatgaccttgcaatgcggtagtcttaaa

SEQ ID NO: 1477 - DNA, 39 bp, Homo sapiens
caggaaacagctatgaccctgctggcattcctcacttac

SEQ ID NO: 1478 - DNA, 39 bp, Homo sapiens
caggaaacagctatgaccggacgccagatactttctcct

SEQ ID NO: 1479 - DNA, 39 bp, Homo sapiens
caggaaacagctatgaccctgttcttcactgccttggtc

SEQ ID NO: 1480 - DNA, 39 bp, Homo sapiens
caggaaacagctatgacctggggagtaggtgtctgtcac

SEQ ID NO: 1481 - DNA, 39 bp, Homo sapiens
caggaaacagctatgacctcaatgctgttttaattccgc

SEQ ID NO: 1482 - DNA, 39 bp, Homo sapiens
caggaaacagctatgaccgactgcttgcacctggaataa

SEQ ID NO: 1483 - DNA, 39 bp, Homo sapiens
caggaaacagctatgaccctaaatctgtttccctgggct

SEQ ID NO: 1484 - DNA, 39 bp, Homo sapiens
caggaaacagctatgacctccctgtattcctggcagtta

SEQ ID NO: 1485 - DNA, 39 bp, Homo sapiens
caggaaacagctatgacctggtgtgttcatgcaatttct

SEQ ID NO: 1486 - DNA, 39 bp, Homo sapiens; identical to SEQ ID NO: 1485

SEQ ID NO: 1487 - DNA, 39 bp, Homo sapiens
caggaaacagctatgaccgatattctctgcccagaaggg

SEQ ID NO: 1488 - DNA, 38 bp, Homo sapiens
caggaaacagctatgaccctgaattcctctggcctctg

SEQ ID NO: 1489 - DNA, 39 bp, Homo sapiens
caggaaacagctatgaccaaggcagatggatcagatgaa

SEQ ID NO: 1490 - DNA, 39 bp, Homo sapiens; identical to SEQ ID NO: 1484

SEQ ID NO: 1491 - DNA, 39 bp, Homo sapiens
caggaaacagctatgaccagtggtaggaggaaacccaga

SEQ ID NO: 1492 - DNA, 39 bp, Homo sapiens; identical to SEQ ID NO: 1491

SEQ ID NO: 1493 - DNA, 39 bp, Homo sapiens
caggaaacagctatgaccctgtggtcttgctatccttcg

SEQ ID NO: 1494 - DNA, 39 bp, Homo sapiens
caggaaacagctatgaccagaattccaggaaggcaaaga

SEQ ID NO: 1495 - DNA, 39 bp, Homo sapiens
caggaaacagctatgaccgacttttgcaccaaccgaata

SEQ ID NO: 1496 - DNA, 39 bp, Homo sapiens
caggaaacagctatgaccgtgctacgtacatgtgaggca

SEQ ID NO: 1497 - DNA, 39 bp, Homo sapiens
caggaaacagctatgaccgaggctgtgttttgtcacaca

SEQ ID NO: 1498 - DNA, 39 bp, Homo sapiens; identical to SEQ ID NO: 1497

SEQ ID NO: 1499 - DNA, 39 bp, Homo sapiens
caggaaacagctatgacctggaggaagaaaacaggtgaa

SEQ ID NO: 1500 - DNA, 39 bp, Homo sapiens
caggaaacagctatgaccatttctaatcggtcttgccca

SEQ ID NO: 1501 - DNA, 39 bp, Homo sapiens
caggaaacagctatgaccctagaatcataggcgcagcag

SEQ ID NO: 1502 - DNA, 39 bp, Homo sapiens
caggaaacagctatgaccgccacttgtttcatactccca

SEQ ID NO: 1503 - DNA, 39 bp, Homo sapiens
caggaaacagctatgaccgactgagcaatgtctggcttc

SEQ ID NO: 1504 - DNA, 39 bp, Homo sapiens
caggaaacagctatgaccacaaacgtccattgagtcagg

SEQ ID NO: 1505 - DNA, 39 bp, Homo sapiens; identical to SEQ ID NO: 1495

SEQ ID NO: 1506 - DNA, 39 bp, Homo sapiens
caggaaacagctatgaccgccacccataaactgatctga

SEQ ID NO: 1507 - DNA, 39 bp, Homo sapiens
caggaaacagctatgaccaatgttttgaaagtccctgcc

SEQ ID NO: 1508 - DNA, 39 bp, Homo sapiens
caggaaacagctatgaccttgagcaaaactgagaaagcc

SEQ ID NO: 1509 - DNA, 39 bp, Homo sapiens
caggaaacagctatgaccacatggaaatcttcgcaagag

SEQ ID NO: 1510 - DNA, 39 bp, Homo sapiens
caggaaacagctatgaccacgagatgcagaagttcaagg

SEQ ID NO: 1511 - DNA, 39 bp, Homo sapiens
caggaaacagctatgacctaatcacacagatcgcctcct

SEQ ID NO: 1512 - DNA, 39 bp, Homo sapiens
caggaaacagctatgaccccaaggactccaaaatcacaa

SEQ ID NO: 1513 - DNA, 39 bp, Homo sapiens
caggaaacagctatgacctcactgatggacaaggaggtc

SEQ ID NO: 1514 - DNA, 39 bp, Homo sapiens
caggaaacagctatgaccgggtgatatggacagcagaag

SEQ ID NO: 1515 - DNA, 39 bp, Homo sapiens; identical to SEQ ID NO: 1496

SEQ ID NO: 1516 - DNA, 39 bp, Homo sapiens
caggaaacagctatgaccttggatgaaaaagaggaagca

SEQ ID NO: 1517 - DNA, 40 bp, Homo sapiens
caggaaacagctatgaccggaactcaaagactcaagtggg

SEQ ID NO: 1518 - DNA, 39 bp, Homo sapiens
caggaaacagctatgaccttgagtcagggactcagcagt

SEQ ID NO: 1519 - DNA, 39 bp, Homo sapiens
caggaaacagctatgaccaatccatattcacaccaagcg

SEQ ID NO: 1520 - DNA, 39 bp, Homo sapiens; identical to SEQ ID NO: 1519

SEQ ID NO: 1521 - DNA, 39 bp, Homo sapiens
caggaaacagctatgacctattgcacaaccatctgtccc

SEQ ID NO: 1522 - DNA, 39 bp, Homo sapiens; identical to SEQ ID NO: 1521

SEQ ID NO: 1523 - DNA, 39 bp, Homo sapiens; identical to SEQ ID NO: 1513

SEQ ID NO: 1524 - DNA, 39 bp, Homo sapiens
caggaaacagctatgaccacaagcttggaggaagcattt

SEQ ID NO: 1525 - DNA, 39 bp, Homo sapiens
caggaaacagctatgaccgacattccacagttgtgagcc

SEQ ID NO: 1526 - DNA, 38 bp, Homo sapiens
caggaaacagctatgacccagcctacaggaagtgggag

SEQ ID NO: 1527 - DNA, 39 bp, Homo sapiens
caggaaacagctatgaccataccaacagcttccccagtt

SEQ ID NO: 1528 - DNA, 39 bp, Homo sapiens
caggaaacagctatgacccaaagactcaagtgggaacga

SEQ ID NO: 1529 - DNA, 39 bp, Homo sapiens; identical to SEQ ID NO: 1514

SEQ ID NO: 1530 - DNA, 39 bp, Homo sapiens
caggaaacagctatgaccactgtacctgcccggttattt

SEQ ID NO: 1531 - DNA, 39 bp, Homo sapiens
caggaaacagctatgacctttgatgcggggtagtgttag

SEQ ID NO: 1532 - DNA, 39 bp, Homo sapiens
caggaaacagctatgacctacccctctaacttgcagggt

SEQ ID NO: 1533 - DNA, 39 bp, Homo sapiens
caggaaacagctatgaccatctgttgggagctgggtagt

SEQ ID NO: 1534 - DNA, 39 bp, Homo sapiens
caggaaacagctatgacctggattggtgactcttatggg

SEQ ID NO: 1535 - DNA, 38 bp, Homo sapiens
caggaaacagctatgaccaactgagagctgaggctgga

SEQ ID NO: 1536 - DNA, 39 bp, Homo sapiens
caggaaacagctatgaccgtggatcatcttagcccacaa

SEQ ID NO: 1537 - DNA, 39 bp, Homo sapiens
caggaaacagctatgacctggcaggaaaaatatggaatc

SEQ ID NO: 1538 - DNA, 39 bp, Homo sapiens
caggaaacagctatgaccctgatctacttcctccccctg

SEQ ID NO: 1539 - DNA, 39 bp, Homo sapiens
caggaaacagctatgaccttgcaaaaagggtcagtatgg

SEQ ID NO: 1540 - DNA, 39 bp, Homo sapiens
caggaaacagctatgacctctggaaccatcagaaacacc

SEQ ID NO: 1541 - DNA, 39 bp, Homo sapiens
caggaaacagctatgacctccaactgctcttcacgaagt

SEQ ID NO: 1542 - DNA, 39 bp, Homo sapiens
caggaaacagctatgaccatgaaatccacccggtatctc

SEQ ID NO: 1543 - DNA, 39 bp, Homo sapiens
caggaaacagctatgacccttcttcctcctgccctacat

SEQ ID NO: 1544 - DNA, 39 bp, Homo sapiens
caggaaacagctatgacccacactatgggccagtgagat

SEQ ID NO: 1545 - DNA, 39 bp, Homo sapiens
caggaaacagctatgaccgtgaagcagatgcctggttag

SEQ ID NO: 1546 - DNA, 39 bp, Homo sapiens
caggaaacagctatgaccattttgaggtccacacactgg

SEQ ID NO: 1547 - DNA, 39 bp, Homo sapiens
caggaaacagctatgaccggaaatgagactacgaacccg

SEQ ID NO: 1548 - DNA, 39 bp, Homo sapiens
caggaaacagctatgaccaagtctgtcaccttctggacg

SEQ ID NO: 1549 - DNA, 39 bp, Homo sapiens
caggaaacagctatgaccacctctcagcctcagaccttc

SEQ ID NO: 1550 - DNA, 39 bp, Homo sapiens
caggaaacagctatgaccctgtttgtctgcacctgtcac

SEQ ID NO: 1551 - DNA, 39 bp, Homo sapiens
caggaaacagctatgaccatgcagaccaaagcatcaaag

SEQ ID NO: 1552 - DNA, 39 bp, Homo sapiens
caggaaacagctatgaccgaccatacaacaattgggtgg

SEQ ID NO: 1553 - DNA, 39 bp, Homo sapiens
caggaaacagctatgaccacatgaatgtaaggccactgc

SEQ ID NO: 1554 - DNA, 40 bp, Homo sapiens
caggaaacagctatgacctcttcagcaaaatttccattgt

SEQ ID NO: 1555 - DNA, 39 bp, Homo sapiens
caggaaacagctatgacctcgacagtggggaaacttaac

SEQ ID NO: 1556 - DNA, 39 bp, Homo sapiens
caggaaacagctatgacccgagtggctaatttgaaacca

SEQ ID NO: 1557 - DNA, 39 bp, Homo sapiens
caggaaacagctatgaccctcccccatgtctctctatcc

SEQ ID NO: 1558 - DNA, 39 bp, Homo sapiens; identical to SEQ ID NO: 1553

SEQ ID NO: 1559 - DNA, 39 bp, Homo sapiens
caggaaacagctatgaccctttcttcctgggcttttcag

SEQ ID NO: 1560 - DNA, 39 bp, Homo sapiens
caggaaacagctatgaccttgtaatccatccgtagcacc

SEQ ID NO: 1561 - DNA, 39 bp, Homo sapiens
caggaaacagctatgaccctcctgcttggaacagatgag

SEQ ID NO: 1562 - DNA, 39 bp, Homo sapiens
caggaaacagctatgaccatccacaatcttccctcgagt

SEQ ID NO: 1563 - DNA, 39 bp, Homo sapiens
caggaaacagctatgaccagccatttagtttgaccctcc

SEQ ID NO: 1564 - DNA, 39 bp, Homo sapiens
caggaaacagctatgacctttgccttggttagggagaat

SEQ ID NO: 1565 - DNA, 39 bp, Homo sapiens
caggaaacagctatgacctgacgacttactttggatgcc

SEQ ID NO: 1566 - DNA, 39 bp, Homo sapiens
caggaaacagctatgaccggagccagaaatggagaactt

SEQ ID NO: 1567 - DNA, 39 bp, Homo sapiens
caggaaacagctatgaccagggttgctcaaccctatcag

SEQ ID NO: 1568 - DNA, 39 bp, Homo sapiens
caggaaacagctatgaccccaacagagcaggaaatgaag

SEQ ID NO: 1569 - DNA, 39 bp, Homo sapiens
caggaaacagctatgaccctagcacatatcccagccaga

SEQ ID NO: 1570 - DNA, 40 bp, Homo sapiens
caggaaacagctatgaccggtttacaaaccactttcagcc

SEQ ID NO: 1571 - DNA, 39 bp, Homo sapiens
caggaaacagctatgacctaagtgacctgcccaaagttg

SEQ ID NO: 1572 - DNA, 18 bp, bacteriophage m13
tgtaaaacgacggccagt

SEQ ID NO: 1573 - DNA, 18 bp, bacteriophage m13
caggaaacagctatgacc

SEQ ID NO: 1574 - DNA, 41 bp, Homo sapiens
gacgcaggagtccccatccccgccttgggctacacagtctg

SEQ ID NO: 1575 - DNA, 41 bp, Homo sapiens
gacgcaggagtccccatcctcgccttgggctacacagtctg

SEQ ID NO: 1576 - DNA, 34 bp, Homo sapiens
gcagcagcggccgcctgcacagagtgctgccgac

SEQ ID NO: 1577 - DNA, 34 bp, Homo sapiens
gcagcagtcgacattccgccagaaaagttggaag

SEQ ID NO: 1578 - DNA, 39 bp, Homo sapiens
gcagcagcggccgcatggcatcatcctggccccctctag

SEQ ID NO: 1579 - DNA, 37 bp, Homo sapiens
gcagcagtcgacaaagaagttggccaattgcaggccc
